(19) United States
(12) Patent Application Publication
(10) Pub. No.: US 2021/0215697 A1
(43) Pub. Date: Jul. 15, 2021

(54) Serum Biomarkers

(71) Applicant: BerGenBio ASA, Bergen (NO)

(72) Inventors: Robert Holt, Bergen (NO); David Micklem, Bergen (NO)

(73) Assignee: BerGenBio ASA, Bergen (NO)

(21) Appl. No.: 17/054,193

(22) PCT Filed: May 13, 2019
(86) PCT No.: PCT/EP2019/062215

§ 371 Date: Nov. 10, 2020

(30) Foreign Application Priority Data
May 14, 2018 (GB) 1807789.1
Oct. 15, 2018 (GB) 1816764.3
Oct. 19, 2018 (GB) 1817024.1

(51) Int. Cl. G01N 33/574; A61K 31/7105; A61K 31/711; C07K 16/28

(52) U.S. Cl. CPC G01N 33/574; A61K 31/7105; G01N 2800/52; C07K 16/2863; G01N 2496/00; A61K 31/711

(57) ABSTRACT

The present disclosure relates to the field of cancer biomarkers and treatments, and more particularly to methods of predicting susceptibility to cancer treatments, in particular treatments with Axl inhibitors. Also disclosed are products, such as kits, having utility in performing the disclosed methods.

### EARLIER APPLICATIONS

[0001] This application claims priority from: United Kingdom application GB1807789.1, filed on 14 May 2018; United Kingdom application GB1817024.1, filed on 19 Oct. 2018; and United Kingdom application GB1816764.3, filed on 15 Oct. 2018. The disclosure of these three priority document is incorporated by reference into the present application for all purposes.

### FIELD OF THE DISCLOSURE

[0002] The present disclosure relates to the field of cancer treatment. In particular the present disclosure relates to the field of cancer biomarkers and treatments, and more particularly to methods of predicting susceptibility to cancer treatments, as well as products, such as kits, to perform these methods.

### BACKGROUND

[0003] Heterogeneous Patient Populations

[0004] Cancers are a large family of diseases characterised by abnormal cell growth and having the potential to invade or spread to other parts of the body. Whilst cancers are categorised into classes which share broad characteristics, some of these classes are particularly heterogeneous. As a result, patients in these heterogeneous populations can display heterogeneity in their drug response—that is, patients in heterogeneous cancer groups can have different responses to the same cancer treatment. By way of example, acute myeloid leukemia (AML) is a heterogeneous cancer in which different subjects can have different responses to the same cancer treatment (De Kouchkovsky et al, 2016).

[0005] By identifying biomarkers that reliably distinguish between subjects who respond to or benefit from treatment and those who do not, it should be possible to use these biomarkers to predict clinical outcome for such patients.

[0006] Predictive Methods

[0007] Predictive methods provide information on the likely outcome of a particular treatment regimen, and have the power to guide the use of tailored therapies. Such methods can provide information regarding, for example, the likelihood of a subject responding to a treatment, how aggressively an individual should be treated within a particular treatment regimen, and/or how aggressively an individual should be treated with conventional therapeutic methods such as radiation/chemotherapy.

[0008] Despite advances in the field of predictive biomarkers and methods, there remains a need for sensitive, efficient, and rapid non-invasive methods of predicting patient response to cancer treatments in a number of heterogeneous cancers.

[0009] The present disclosure has been devised in light of the above considerations.

### SUMMARY OF THE DISCLOSURE

[0010] The present disclosure addresses the need for methods of predicting the susceptibility of a subject having, suspected of having, or diagnosed with cancer to cancer treatments by assessing biomarkers in the subject or in a sample obtained from the subject. In particular, the disclosure provides such predictive methods which assess one or more of the biomarkers described herein in a serum sample from the subject.

[0011] The present authors herein describe biomarkers and combinations thereof, methods and products for use in such methods that are of significant value in predicting clinical outcome for cancer patients. In particular, the present authors have evaluated and identified biomarkers and combinations thereof which are of significant value in the prediction of a subject's response to cancer therapies; a clinical outcome of particular interest is prediction of the subject's response to an agent capable of inhibiting or reversing EMT, in particular the subject's response to Axl kinase inhibitors such as BGB324.

[0012] Accordingly, in one facet of the present disclosure the authors have identified biomarkers and combinations thereof of significant value in the prediction of response to cancer therapies for a subject having, suspected of having, or diagnosed with acute myelocytic leukemia (AML).

[0013] In a first aspect of this facet the present disclosure provides a method of predicting a cancer-related outcome in a subject, the method comprising assessing the activity, expression, or amount of one or more biomarker in the subject, or in a sample derived from the subject; wherein the one or more biomarker is selected from the group consisting of: Axl, FGF-21, RAGE, CEA, FSH, MMP-10, Omentin, CA-19-9, LH, Haptoglobin, NAP-2, IgE, and/or CD40-L; and, wherein the subject has, is suspected of having, or has been diagnosed with acute myelocytic leukemia (AML).

[0014] In some embodiments the method comprises assessing the activity, expression, or amount of one or more biomarker in the subject, or in a sample derived from the subject, to obtain a sample profile of the one or more biomarker; and, making a prediction based on the sample profile of the one or more biomarker.

[0015] In some embodiments the prediction is made by comparing the sample profile to a control profile. In some such embodiments the sample profile is obtained before the subject is contacted with or administered an agent capable of inhibiting or reversing EMT or a chemotherapeutic agent.

[0016] In embodiments in which the sample profile is obtained before the subject is contacted with or administered an agent capable of inhibiting or reversing EMT or a chemotherapeutic agent, the control profile may be: (i) obtained from a population of control subjects having AML; (ii) obtained from a control subject or population of control subjects having AML and previously found to lack susceptibility to treatment with an agent capable of inhibiting or reversing EMT or a chemotherapeutic agent; (iii) a predetermined profile of “average, median, or mean” or “standard ranges” of biomarker expression, activity, or amount values obtained from a control subject or population of control subjects having AML and previously found to lack susceptibility to treatment with an agent capable of inhibiting or reversing EMT or a chemotherapeutic agent; (iv) obtained from a control sample having a known “average, median, or mean” value of biomarkers indicative of a control subject or population of control subjects having AML and previously found to lack susceptibility to treatment with an agent capable of inhibiting or reversing EMT or a chemotherapeutic agent; (v) a predetermined profile of biomarker expression, activity, or amount “threshold” values obtained from a control subject or population of control subjects having AML and previously found to be susceptible to treatment with an agent capable of inhibiting or reversing EMT or a chemotherapeutic agent; or (vi) obtained from a control sample having a known “threshold” value of biomarkers indicative of a control subject or population of control subjects having AML and previously found to be susceptible to treatment with an agent capable of inhibiting or reversing EMT or a chemotherapeutic agent.

[0017] In embodiments in which the sample profile is obtained before the subject is contacted with or administered an agent capable of inhibiting or reversing EMT or a chemotherapeutic agent, the one or more biomarker may include at least one of: Haptoglobin, NAP-2, IgE, and/or CD40-L; wherein a higher activity, expression, or amount of one or more of said biomarkers in the sample profile as compared with the control profile is indicative of susceptibility to treatment with an agent capable of inhibiting or reversing EMT or a chemotherapeutic agent. In other embodiments, the one or more biomarker may include at least one of: Axl, FGF-21, RAGE, CEA, FSH, MMP-10, Omentin, CA-19-9, and/or LH; wherein a lower activity, expression, or amount of one or more of said biomarkers in the sample profile as compared with the control profile is indicative of susceptibility to treatment with an agent capable of inhibiting or reversing EMT or a chemotherapeutic agent.

[0018] In some embodiments in which the sample profile is obtained before the subject is contacted with or administered an agent capable of inhibiting or reversing EMT or a chemotherapeutic agent, the one or more biomarker may comprise Axl. In other embodiments the one or more biomarker may comprise Axl and at least 1, 2, 3, 4, 5, 6, 7, 8, 9, 10, or more further biomarkers selected from: FGF-21, RAGE, CEA, FSH, MMP-10, Omentin, CA-19-9, LH, Haptoglobin, NAP-2, IgE, and/or CD40-L.

[0019] In some embodiments the sample profile is obtained after contacting the subject with an agent capable of inhibiting or reversing EMT or a chemotherapeutic agent. In some such embodiments the control profile is obtained from the same subject prior to contacting said subject with the agent capable of inhibiting or reversing EMT or a chemotherapeutic agent.

[0020] In some embodiments in which the sample profile is obtained after contacting the subject with an agent capable of inhibiting or reversing EMT or a chemotherapeutic agent, wherein an increase in the activity, expression, or amount of one or more biomarker in the sample profile as compared with the control profile is indicative of higher susceptibility to treatment with an agent capable of inhibiting or reversing EMT or a chemotherapeutic agent. In some such embodiments the one or more biomarker includes at least Axl.

[0021] In some embodiments the method comprises determining the amount of at least 2, 3, 4, 5, 6, 7, 8, 9, 10, 11, 12, 13, 14, 15, 20 of said biomarkers in the subject, or sample derived from the subject. In some embodiments assessing the expression or amount of one or more biomarker in the subject, or in a sample derived from the subject, comprises: contacting a sample, or an extract from the sample, with at least 1, 2, 3, 4, 5, 6, 7, 8, 9, 10 or more specific binding members, each of which selectively binds to a respective biomarker protein; and detecting and/or quantifying formation of complex formed by said specific binding member and said biomarker protein. In some embodiments the specific binding member comprises an antibody molecule or binding fragment thereof.

[0022] In some embodiments the agent capable of inhibiting or reversing EMT or chemotherapeutic agent is an Axl inhibitor. Preferably the Axl inhibitor is BGB324/R428/bemcentinib, or an anti-Axl antibody described in WO2015/193428, WO2015/193430, WO2016/097370, or WO2016/166296.

[0023] In some embodiments the agent capable of inhibiting or reversing EMT is administered in combination with a further cancer treatment. In some preferred embodiments the further cancer treatment is cytarabine or decitabine.

[0024] In preferred embodiments the subject is mammalian, more preferably human. In preferred embodiments the sample is a blood, serum, or plasma sample, most preferably a serum sample.

[0025] In some embodiments the method is performed in vitro or ex vivo.

[0026] In another aspect of this facet the disclosure provides methods of selecting subjects having, suspected of having, or diagnosed with acute myelocytic leukemia (AML) for treatment with an agent capable of inhibiting or reversing EMT or a chemotherapeutic agent comprising: identifying subjects susceptible to treatment with an agent capable of inhibiting or reversing EMT or a chemotherapeutic agent using a predictive method as outlined above; and selecting thus identified subjects for treatment. In some embodiments the method is a method of selecting subjects having, suspected of having, or diagnosed with acute myelocytic leukemia (AML) for continued treatment with an agent capable of inhibiting or reversing EMT or a chemotherapeutic agent, the method comprising: identifying subjects susceptible to treatment with an agent capable of inhibiting or reversing EMT or a chemotherapeutic agent using a predictive method as outlined above; and selecting thus identified subjects for continued treatment.

[0027] A further aspect of this facet of the disclosure relates to a diagnostic kit or test device comprising: 1, 2, 3, 4, 5, 6, 7, 8, 9, 10 or more specific binding members, each of which selectively binds to a biomarker selected from the group consisting of: Axl, FGF-21, RAGE, CEA, FSH, MMP-10, Omentin, CA-19-9, LH, Haptoglobin, NAP-2, IgE, and/or CD40-L; and one or more reagents for detecting said one or more specific binding members or one or more reagents for detecting and/or quantifying formation of a complex formed by said specific binding member and said biomarker. In some embodiments the diagnostic kit or test device is for use in a method of predicting a cancer-related outcome in a subject. In some embodiments the method is a predictive method as outlined above.

[0028] A further aspect of this facet of the disclosure relates to use of one or more of: Axl, FGF-21, RAGE, CEA, FSH, MMP-10, Omentin, CA-19-9, LH, Haptoglobin, NAP-2, IgE, and/or CD40-L, as a biomarker for determining if a subject is susceptible to treatment with an agent capable of inhibiting or reversing EMT or a chemotherapeutic agent. In some embodiments the use is as a biomarker in a predictive method as outlined above.

[0029] Further facets of the disclosure relate to biomarkers and combinations thereof, methods and products for use in such methods that are of significant value in predicting clinical outcome for subjects having, suspected of having, or diagnosed with myelodysplastic syndromes (MDS), melanoma, triple-negative breast cancer (TNBC), non-small cell lung cancer (NSCLC), and lung adenocarcinoma. In particular, the present authors have evaluated and identified biomarkers and combinations thereof which are of significant value in the prediction of a subject having one of these cancers' response to cancer therapies; a clinical outcome of particular interest is prediction of the subject's response to an agent capable of inhibiting or reversing EMT, in particular the subject's response to Axl kinase inhibitors such as BGB324. Each of these facets has aspects corresponding to those set out above for AML; these and other aspects are disclosed in more detail below.

[0030] The disclosure includes the combination of the aspects and preferred features described except where such a combination is clearly impermissible or expressly avoided.

### DETAILED DESCRIPTION OF THE DISCLOSURE

[0031] Facets, aspects and embodiments of the present disclosure will now be discussed with reference to the accompanying figures. Further aspects and embodiments will be apparent to those skilled in the art. All documents mentioned in this text are incorporated herein by reference.

[0032] The present authors herein describe biomarkers and combinations thereof, as well as methods and products for use in such methods that are of significant value for the prediction of cancer-related outcomes. In particular, the present authors have identified and evaluated serum-based markers, and combinations thereof, which are of significant value in the prediction of a subject's response to cancer therapies. In some embodiments the cancer therapy is an agent capable of inhibiting or reversing EMT, for example an Axl inhibitor or Akt3 inhibitor.

[0033] Biomarkers in Predictive Methods

[0034] Heterogeneous Patient Populations

[0035] Whilst cancers are categorised into classes which share broad characteristics, these classes may be composed of heterogeneous sub-populations. Patients in different sub-populations may have different responses to the same cancer treatment.

[0036] For example, acute myeloid leukemia (AML) is known to be a heterogeneous cancer with existing cell lines such as MOLM13 and Mv4-11 that have a low IC50 to Axl inhibitors such as BGB324 (i.e. cells that respond well to treatment with Axl-inhibitors, so-called “responder” cell lines), and cells such as Kasumi, OCI-M1 and OCI-AML5 that have a high 1050 to Axl inhibitors such as BGB324 (i.e. cells that respond poorly to treatment with Axl-inhibitors, so-called “non-responder” cell lines; Ben-Batalla et al, 2013). Similarly, the present authors have found that in AML in humans there are subjects who respond to or benefit from treatment with Axl inhibitors such as BGB324 (so-called “responder” subjects), and subjects who do not respond to or benefit from treatment with Axl inhibitors such as BGB324 (so-called “non-responder” subjects).

[0037] By identifying biomarkers that reliably distinguish these responder and non-responder subjects it is possible to use the biomarkers to predict the clinical outcome for subjects.

[0038] Predictive Methods

[0039] The term “predictive method” as used herein means a method that enables a determination of the likelihood of a subject being susceptible or responsive to treatment with a particular agent/regimen. Such predictive methods provide information on the likely outcome of a particular treatment regimen, for example, the likelihood of a subject responding to said treatment, and/or information as to how aggressively an individual should be treated within a particular treatment regimen, and/or how aggressively an individual should be treated with conventional therapeutic methods such as radiation/chemotherapy. The predictive methods described herein therefore have important applications in the field of personalised medicines.

[0040] The predictive methods described herein enable predictions regarding the susceptibility of human or animal subjects diagnosed with a disease to treatment with an agent capable of inhibiting or reversing EMT or a chemotherapeutic agent. More specifically, the disease of interest may be cancer, including acute myelocytic leukemias (AMLs) or myelodysplastic syndromes (MDSs), breast, lung, prostate, ovarian, colorectal, glioma, melanoma, gastric, head and neck, renal, pancreatic, uterine, hepatic, bladder, and endometrial cancers, as well as other leukemias. AML and MDS are of particular interest, as are lung cancers such as non-small cell lung carcinoma, in particular lung adenocarcinoma.

[0041] The authors herein describe biomarkers and combinations thereof that are of significant value in predicting clinical outcome for cancer patients. In particular, the present authors have evaluated and identified serum-based markers which are of significant value in the prediction of a subject's response to cancer therapies. Also contemplated are panels comprising two or more of the biomarkers, offering increased sensitivity and reliability in predicting cancer-related outcomes, for example susceptibility to treatment with an agent capable of inhibiting or reversing EMT or a chemotherapeutic agent.

[0042] Solid and Liquid Tumours

[0043] Tumours may be termed “solid” or “liquid” dependent upon where in the body they grow. The majority of cancers are caused by solid tumours present as a mass of cells in particular organ or tissue. Common “solid” tumour cancers include breast, lung, prostate, and colon cancers. Liquid tumours are those which develop in the blood or bone marrow and which can travel to any part of the body, for example leukaemia or myeloma. “Liquid” tumour cancers may also be referred to as “blood cancers”.

[0044] The authors have observed that different markers are predictive of a subject's response to cancer therapies in solid as compared to liquid tumour cancers.

[0045] Accordingly, the disclosure provides methods of predicting a cancer-related outcome in a subject having, suspected of having, or diagnosed with a solid tumour cancer, the method comprising assessing the activity, expression, or amount of one or more of the biomarkers described herein in the subject, or in a sample derived from the subject.

[0046] The disclosure also provides methods of predicting a cancer-related outcome in a subject having, suspected of having, or diagnosed with a liquid tumour cancer, the method comprising assessing the activity, expression, or amount of one or more of the biomarkers described herein in the subject, or in a sample derived from the subject.

[0047] In some embodiments the cancer-related outcome is susceptibility to treatment with an agent capable of inhibiting or reversing EMT or a chemotherapeutic agent. In some preferred embodiments the cancer-related outcome is susceptibility to treatment with an Axl inhibitor.

[0048] Solid tumour cancers include, for example, breast, renal, endometrial, ovarian, thyroid, and non-small cell lung carcinoma, melanoma, prostate carcinoma, sarcoma, gastric cancer and uveal melanoma. Liquid tumour cancers include, for example, leukemias (particularly myeloid leukemias) and lymphomas.

[0049] Facet 1: Acute Myelocytic Leukemia (AML)

[0050] Acute myeloid leukemia (AML) is a clonal disease of hematopoietic progenitors that is characterized by numerous heterogeneous genetic changes that alter the cells' normal mechanisms of proliferation, differentiation and cell death (Burnett et al., 2011). Currently, most AML patients are treated with chemotherapy such as Cytarabine. Apart from the BCR-Abl targeting drug Gleevec for treatment of chronic myelogenous leukemia (CML) and the differentiation-inducing drug ATRA for treatment of acute promyelocytic leukemia (APL), targeted therapy has so far been extensively lacking in the field of leukemia. This despite AML being a well characterized disease with several mutated oncogenes that could potentially be therapeutic targets (Haferlach, 2008).

[0051] Accordingly, robust biomarkers for predicting cancer-related outcomes in a subject, for example susceptibility to treatment with an agent capable of inhibiting or reversing EMT or a chemotherapeutic agent, would be useful in identifying subjects who are most likely to respond to or benefit from treatment with a particular agent/regimen.

[0052] A “responder” AML cell line is a cell line with a low IC₅₀ for Axl inhibitors, for example the small molecule Axl kinase inhibitor BGB324/R428/bemcentinib; examples include the MOLM13 and Mv4-11 cell lines, with an IC₅₀ of 0.45 μM and 0.14 μM, respectively. Correspondingly, a “non-responder” AML cell line is a cell line with a high IC₅₀ for Axl inhibitors, for example the small molecule Axl kinase inhibitor BGB324/R428/bemcentinib; examples are the Kasumi and OCI-M1 cell lines, with an IC₅₀ of 1.2 μM and 1.8 μM, respectively.

[0053] A “responder” subject as described herein is a subject who is likely to, or who does, respond to treatment (or benefit from treatment) with an agent capable of inhibiting or reversing EMT or a chemotherapeutic agent, for example the small molecule Axl kinase inhibitor BGB324/R428/bemcentinib when administered either as a single agent or in combination with another cancer treatment.

[0054] Correspondingly, a “non-responder” subject as described herein is a subject who is not likely to, or who does not, respond to treatment (or benefit from treatment) with an agent capable of inhibiting or reversing EMT or a chemotherapeutic agent, for example the small molecule Axl kinase inhibitor BGB324/R428/bemcentinib when administered either as a single agent or in combination with another cancer treatment.

[0055] To “respond to treatment” or “benefit from treatment” as used herein means to experience an overall clinical benefit from the treatment. This overall clinical benefit can be any of: prolonged survival, partial or complete disease remission (for example, as assessed by % bone marrow myeloblasts and/or normal maturation of cell lines), slowing or absence of disease progression (for example, as assessed by change in % bone marrow myeloblasts), improved quality of life (for example, as assessed using a health-related quality of life questionnaire such as a Functional Assessment of Cancer Therapy (FACT) questionnaire), progression-free survival, hematologic improvement (for example: increased blood haemoglobin, platelet count, and/or neutrophil count), bone marrow response (for example: bone marrow with 5% myeloblasts; 30%, 40%, 50% or more reduction in bone marrow myeloblasts; absence of circulating myeloblasts and myeloblasts with Auer rods; absence of extramedullary disease), hematologic recovery (for example: ≥1 g/dL haemoglobin, ≥100×10⁹/L platelets, and/or ≥1×10⁹/L neutrophils in peripheral blood), negative response for a genetic marker (for example, CEBPA, NPM1, or FLT3), or any other positive patient outcome.

[0056] Biomarkers

[0057] The term “marker” or “biomarker” is used herein to refer to a gene or protein whose expression in a subject or sample derived from a subject is altered or modulated, for example, up or down regulated, in cancer. Where the biomarker is a protein, modulation or alteration of expression encompasses modulation through different post-translational modifications.

[0058] In accordance with any aspect of this facet of the present disclosure the biomarkers described herein may be defined as follows, wherein:
[0059] an Axl biomarker comprises an amino acid sequence having at least 70%, 80%, 90%, 95%, 99% or 100% sequence identity with the full-length of the amino acid sequence disclosed at UniProt accession no: P30530-1 or P30530-2 (entry version 196) or a fragment thereof;
[0060] a Fibroblast Growth Factor 21 (FGF-21) biomarker comprises an amino acid sequence having at least 70%, 80%, 90%, 95%, 99% or 100% sequence identity with the full-length of the amino acid sequence disclosed at UniProt accession no: Q9NSA1 (entry version 145) or a fragment thereof;
[0061] a Receptor for advanced glycosylation end products (RAGE) biomarker comprises an amino acid sequence having at least 70%, 80%, 90%, 95%, 99% or 100% sequence identity with the full-length of the amino acid sequence disclosed at UniProt accession no: Q15109-1, Q15109-2, Q15109-3, Q15109-4, Q15109-5, Q15109-6, Q15109-7, Q15109-8, Q15109-9, Q15109-10 (entry version 189) or a fragment thereof;
[0062] a Carcinoembryonic Antigen (CEA) biomarker comprises an amino acid sequence having at least 70%, 80%, 90%, 95%, 99% or 100% sequence identity with the full-length of the amino acid sequence disclosed at UniProt accession no: P06731-1 or P06731-2 (entry version 179) or a fragment thereof;
[0063] a Follicle-Stimulating Hormone (FSH) biomarker comprises an amino acid sequence having at least 70%, 80%, 90%, 95%, 99% or 100% sequence identity with the full-length of the amino acid sequence disclosed at UniProt accession no: P01225 (entry version 189) or a fragment thereof;
[0064] a Matrix Metalloproteinase-10 (MMP-10) biomarker comprises an amino acid sequence having at least 70%, 80%, 90%, 95%, 99% or 100% sequence identity with the full-length of the amino acid sequence disclosed at UniProt accession no: P09238 (entry version 185) or a fragment thereof;
[0065] an Omentin biomarker comprises an amino acid sequence having at least 70%, 80%, 90%, 95%, 99% or 100% sequence identity with the full-length of the amino acid sequence disclosed at UniProt accession no: Q8WWA0 (entry version 127) or a fragment thereof;
[0066] a Cancer Antigen 19-9 (CA-19-9) biomarker comprises an amino acid sequence having at least 70%, 80%, 90%, 95%, 99% or 100% sequence identity with the full-length of the amino acid sequence disclosed at UniProt accession no: Q9BXJ9-1 or Q9BXJ9-2 (entry version 160) or a fragment thereof;
[0067] a Luteinizing Hormone (LH) biomarker comprises an amino acid sequence having at least 70%, 80%, 90%, 95%, 99% or 100% sequence identity with the full-length of the amino acid sequence disclosed at UniProt accession no: P01229 (entry version 179) or a fragment thereof;
[0068] a Haptoglobin (HP) biomarker comprises an amino acid sequence having at least 70%, 80%, 90%, 95%, 99% or 100% sequence identity with the full-length of the amino acid sequence disclosed at UniProt accession no: P00738-1 or P00738-2 (entry version 200) or a fragment thereof;
[0069] a Neutrophil Activating Peptide 2 (NAP-2) biomarker comprises an amino acid sequence having at least 70%, 80%, 90%, 95%, 99% or 100% sequence identity with the full-length of the amino acid sequence disclosed at UniProt accession no: P02775 (entry version 191) or a fragment thereof;
[0070] an Immunoglobulin E (IgE) biomarker comprises an amino acid sequence having at least 70%, 80%, 90%, 95%, 99% or 100% sequence identity with the full-length of the amino acid sequence disclosed at UniProt accession no: P01854 (entry version 162) or a fragment thereof; and/or
[0071] a CD40 Ligand (CD40-L) biomarker comprises an amino acid sequence having at least 70%, 80%, 90%, 95%, 99% or 100% sequence identity with the full-length of the amino acid sequence disclosed at UniProt accession no: P29965 (entry version 199) or a fragment thereof.

[0072] The biomarkers described herein may also be defined as a nucleic acid (either DNA or RNA) having at least 70%, 80%, 90%, 95%, 99% or 100% sequence identity with the full-length nucleic acid sequence encoding any of the above amino acid sequences.

[0073] Identity may be as defined using sequence comparisons made using FASTA and FASTP (see Pearson & Lipman, 1988. Methods in Enzymology 183: 63-98). Parameters are preferably set, using the default matrix, as follows: Gapopen (penalty for the first residue in a gap): −12 for proteins/-16 for DNA; Gapext (penalty for additional residues in a gap): −2 for proteins/-4 for DNA; KTUP word length: 2 for proteins/6 for DNA.

[0074] Pre-Treatment Predictive Biomarkers and Methods

[0075] By analysing patient data obtained from clinical trial BGBC003 (NCT02488408), the authors have discovered that, prior to treatment of subjects having AML, certain of the biomarkers described herein are present in the serum of “responder” subjects at higher levels than in the serum of “non-responder” subjects—see Example 1. Similarly, prior to treatment of the subject certain of the biomarkers described herein are present in the serum of “responder” subjects at lower levels than in the serum of “non-responder” subjects. Thus, by assessing the activity, expression, or amount of one or more of the biomarkers described herein prior to treatment with an agent capable of inhibiting or reversing EMT or a chemotherapeutic agent it is possible to determine the likelihood of that subject being susceptible or responsive to treatment with said agent.

[0076] Accordingly, in a first aspect, the disclosure provides a method of predicting a cancer-related outcome in a subject having, suspected of having, or diagnosed with acute myelocytic leukemia (AML), the method comprising assessing the activity, expression, or amount of one or more of the biomarkers described herein in the subject, or in a sample derived from the subject.

[0077] In some embodiments the one or more biomarker is selected from the group consisting of: Axl, Fibroblast Growth Factor 21 (FGF-21), Receptor for advanced glycosylation end products (RAGE), Carcinoembryonic Antigen (CEA), Follicle-Stimulating Hormone (FSH), Matrix Metalloproteinase-10 (MMP-10), Omentin, Cancer Antigen 19-9 (CA-19-9), Luteinizing Hormone (LH), Haptoglobin (HP), Neutrophil Activating Peptide 2 (NAP-2), Immunoglobulin E (IgE), and/or CD40 Ligand (CD40-L).

[0078] In some embodiments the one or more biomarker is, or includes, Axl.

[0079] A “cancer-related outcome” as described herein is a clinical prediction or prognosis associated with cancer. In some embodiments the cancer-related outcome is susceptibility to treatment with an agent capable of inhibiting or reversing EMT or a chemotherapeutic agent.

[0080] In some embodiments the method comprises assessing the activity, expression, or amount of one or more of the biomarkers described herein in the subject, or in a sample derived from the subject, to obtain a sample profile of the one or more biomarker; and, making a prediction based on the sample profile of the one or more biomarker.

[0081] A “sample profile” as used herein is a profile of numerical values or numerical ranges corresponding to the activity, expression, or amount of respective biomarkers determined in the subject or sample derived from the subject.

[0082] In some embodiments of the method the prediction is made by comparing the sample profile to a control profile. A “control profile” as used herein is a profile of numerical values or numerical ranges corresponding to the activity, expression, or amount of the same biomarkers as for the sample profile, determined in a control subject or population of control subjects. Suitable control profiles are described in more detail below.

[0083] Prior to treatment of a subject, certain of the biomarkers described herein have been found to exhibit up-regulated expression in “responder” subjects—that is, certain of the biomarkers described herein have been found to be present in the serum of “responder” subjects at higher levels than in the serum of “non-responder” subjects. Similarly, prior to treatment of a subject, certain of the biomarkers described herein have been found to exhibit down-regulated expression in “responder” subjects—that is, certain of the biomarkers described herein have been found to be present in the serum of “responder” subjects at lower levels than in the serum of “non-responder” subjects.

[0084] This difference in expression level between “responder” and “non-responder” subjects can also be expressed in the opposite way. That is to say, prior to treatment of a subject, certain of the biomarkers described herein have been found to exhibit down-regulated expression in “non-responder” subjects—that is, certain of the biomarkers described herein have been found to be present in the serum of “non-responder” subjects at lower levels than in the serum of “responder” subjects. Similarly, prior to treatment of a subject, certain of the biomarkers described herein have been found to exhibit up-regulated expression in “non-responder” subjects—that is, certain of the biomarkers described herein have been found to be present in the serum of “non-responder” subjects at higher levels than in the serum of “responder” subjects.

[0085] The discovery of these differential patterns of expression mean that, by assessing the activity, expression, or amount of one or more of the biomarkers described herein prior to treatment of a subject with an agent, it is possible to determine the likelihood of that subject being susceptible or responsive to treatment with said agent. Accordingly, in particularly preferred embodiments the sample profile is obtained before the subject is contacted with or administered the agent capable of inhibiting or reversing EMT or a chemotherapeutic agent.

[0086] A subject who is “susceptible to treatment” with an agent capable of inhibiting or reversing EMT or a chemotherapeutic agent is one who is likely to, or who does, respond to treatment (or benefit from treatment) with an agent capable of inhibiting or reversing EMT or a chemotherapeutic agent. That is, a subject who is “susceptible to treatment” with an agent is a “responder” subject for that agent, as defined above. A prediction that is “indicative of susceptibility” is one which suggests or points towards the likelihood that a subject will respond to or benefit from treatment.

[0087] In some embodiments the predictive methods of the disclosure comprise assessing the activity, expression, or amount of one or more of the biomarkers described herein in the subject, or in a sample derived from the subject, to obtain a sample profile of the one or more biomarker; and, making a prediction based on the sample profile of the one or more biomarker. In some embodiments of the method the prediction is made by comparing the sample profile to a control profile, wherein the control profile is a profile of numerical values or numerical ranges corresponding to the activity, expression, or amount of the same biomarkers as for the sample profile, determined in a control subject or population of control subjects.

[0088] In some embodiments the control profile may be obtained from a population of control subjects having AML. In some embodiments the control profile may be obtained from a population of control subjects not having AML. In other embodiments the control profile may be obtained from a control subject or population of control subjects having AML and previously found to lack susceptibility to treatment with an agent capable of inhibiting or reversing EMT or a chemotherapeutic agent (that is, non-responder subjects).

[0089] In some embodiments the control profile may a predetermined profile of biomarker expression, activity, or amount values, for example a profile of “mean” values, “threshold” values, or “standard ranges” of values. This predetermined profile of biomarker expression, activity, or amount values can be obtained, for example, from a control subject or population of control subjects having AML, a control subject or population of control subjects not having AML, or a control subject or population of control subjects having AML and previously found to lack susceptibility to treatment with an agent capable of inhibiting or reversing EMT or a chemotherapeutic agent (that is, non-responder subjects).

[0090] In some other embodiments the control profile may be obtained from a control subject or population of control subjects having AML and previously found to be susceptible to treatment with an agent capable of inhibiting or reversing EMT or a chemotherapeutic agent (that is, responder subjects). In some embodiments the control profile may a predetermined profile of biomarker expression, activity, or amount values, for example a profile of “threshold”, values or “standard ranges” of values. This predetermined profile of biomarker expression, activity, or amount values can be obtained, for example, from a control subject or population of control subjects having AML and previously found to be susceptible to treatment with an agent capable of inhibiting or reversing EMT or a chemotherapeutic agent (that is, responder subjects).

[0091] In some other embodiments the control profile may be obtained from a control sample having a known amount (for example a “threshold” amount) of the same biomarkers as will be determined in the sample profile. This threshold amount can be obtained, for example, from non-responder or responder subjects as outlined above.

[0092] The skilled person is readily able to determine suitable “mean”, “threshold”, or “standard range” values for a particular biomarker.

[0093] For example, a “mean” value may be determined by: assessing the activity, expression, or amount of a particular biomarker in a population of subjects having (or not having) AML; and, averaging the biomarker activity, expression, or amount determined to determine a “mean” value.

[0094] For example, a “mean” value may be determined by: assessing the activity, expression, or amount of a particular biomarker in a population of subjects; determining which subjects in the population are susceptible to treatment with an agent capable of inhibiting or reversing EMT or a chemotherapeutic agent; and, averaging the biomarker activity, expression, or amount determined in subjects found to be susceptible to treatment with an agent capable of inhibiting or reversing EMT or a chemotherapeutic agent (that is, responder subjects) to determine a “mean” value.

[0095] For example, a “threshold” value may be determined by: assessing the activity, expression, or amount of a particular biomarker in a population of subjects; determining which subjects in the population are susceptible to treatment with an agent capable of inhibiting or reversing EMT or a chemotherapeutic agent; and, selecting as appropriate the highest or lowest biomarker activity, expression, or amount determined in a subject found to be susceptible to treatment with an agent capable of inhibiting or reversing EMT or a chemotherapeutic agent (that is, a responder subject) as the “threshold value”.

[0096] For example, a “standard range” of values may be determined by: assessing the activity, expression, or amount of a particular biomarker in a population of subjects having (or not having) AML; and, determining a “standard range” of values based on this assessment.

[0097] For example, a “standard range” of values may be determined by: assessing the activity, expression, or amount of a particular biomarker in a population of subjects; determining which subjects in the population are susceptible to treatment with an agent capable of inhibiting or reversing EMT or a chemotherapeutic agent; and, determining a “standard range” of values for subjects found to be susceptible to treatment with an agent capable of inhibiting or reversing EMT or a chemotherapeutic agent (that is, a responder subject) based on this assessment.

[0098] Where the control profile is a predetermined profile of biomarker expression, activity, or amount values, this may be provided as a “look-up table” or data record. Predetermined control profiles of this type may be a profile of numerical values or numerical ranges corresponding to a measure of central tendency (such as an average, median or mean) amount of the respective biomarkers determined in a plurality of control subjects (for example non-responder or responder subjects as outlined above). The skilled person is readily able to determine both a measure of central tendency and a measure of variability within a population using standard protein quantification techniques and suitable statistical tools.

[0099] Accordingly, in embodiments in which the control profile is: obtained from a population of control subjects having AML; obtained from a population of control subjects not having AML; obtained from a control subject or population of control subjects having AML and previously found to lack susceptibility to treatment with an agent capable of inhibiting or reversing EMT or a chemotherapeutic agent (that is non-responder subjects); a predetermined profile of biomarker expression, activity, or amount values (for example a profile of “average, median, or mean” values or “standard ranges” of values) obtained from non-responder subjects; obtained from a control sample having a known “average, median, or mean” value of biomarkers indicative of non-responder subjects; a predetermined profile of biomarker expression, activity, or amount “threshold” values obtained from responder subjects; or, obtained from a control sample having a known “threshold” value of biomarkers indicative of responder subjects; then, a higher activity, expression, or amount of one or more of the biomarkers described herein in a sample profile as compared with the control profile may be indicative of susceptibility to treatment with an agent capable of inhibiting or reversing EMT or a chemotherapeutic agent. Similarly, a lower activity, expression, or amount of one or more of the biomarkers described herein in the sample profile as compared with a control profile may be indicative of susceptibility to treatment with an agent capable of inhibiting or reversing EMT or a chemotherapeutic agent.

[0100] In some such embodiments, the method may comprise assessing the activity, expression, or amount of one or more of biomarker selected from: Haptoglobin, NAP-2, IgE, and/or CD40-L; wherein a higher activity, expression, or amount of one or more of said biomarkers in the sample profile as compared with the control profile is indicative of susceptibility to treatment with an agent capable of inhibiting or reversing EMT or a chemotherapeutic agent.

[0101] In some such embodiments, the method may comprise assessing the activity, expression, or amount of one or more of biomarker selected from: Axl, FGF-21, RAGE, CEA, FSH, MMP-10, Omentin, CA-19-9, and/or LH; wherein a lower activity, expression, or amount of one or more of said biomarkers in the sample profile as compared with the control profile is indicative of susceptibility to treatment with an agent capable of inhibiting or reversing EMT or a chemotherapeutic agent.

[0102] In some such embodiments: a lower activity, expression, or amount of Axl; and/or a lower activity, expression, or amount of FGF-21; and/or a lower activity, expression, or amount of RAGE; and/or a lower activity, expression, or amount of CEA; and/or a lower activity, expression, or amount of FSH; and/or a lower activity, expression, or amount of MMP-10; and/or a lower activity, expression, or amount of Omentin; and/or a lower activity, expression, or amount of CA-19-9; and/or a lower activity, expression, or amount of LH; and/or a higher activity, expression, or amount of Haptoglobin; and/or a higher activity, expression, or amount of NAP-2; and/or a higher activity, expression, or amount of IgE; and/or a higher activity, expression, or amount of CD40-L; in the sample profile as compared with the control profile is indicative of susceptibility to treatment with an agent capable of inhibiting or reversing EMT or a chemotherapeutic agent.

[0103] In embodiments in which the control profile is: obtained from a control subject or population of control subjects having AML and previously found to be susceptible to treatment with an agent capable of inhibiting or reversing EMT or a chemotherapeutic agent (that is, responder subjects); then, if the expression, activity, or amount values in the sample profile are above a “threshold” value typical of a responder subject (that is, a subject having AML and previously found to be susceptible to treatment with an agent capable of inhibiting or reversing EMT or a chemotherapeutic agent) this is indicative of susceptibility to treatment with an agent capable of inhibiting or reversing EMT or a chemotherapeutic agent. Similarly, if the expression, activity, or amount values in the sample profile are below the “threshold” value typical of a responder subject (that is, a subject having AML and previously found to be susceptible to treatment with an agent capable of inhibiting or reversing EMT or a chemotherapeutic agent) this is indicative of a lack of susceptibility to treatment with an agent capable of inhibiting or reversing EMT or a chemotherapeutic agent.

[0104] In embodiments in which the control profile is: a predetermined profile of “standard ranges” of biomarker expression, activity, or amount values obtained from responder subjects; then, if the expression, activity, or amount values in the sample profile are within the “standard range” of values typical of a responder subject (that is, a subject having AML and previously found to be susceptible to treatment with an agent capable of inhibiting or reversing EMT or a chemotherapeutic agent) this is indicative of susceptibility to treatment with an agent capable of inhibiting or reversing EMT or a chemotherapeutic agent. Similarly, if the expression, activity, or amount values in the sample profile are outside the “standard range” of values typical of a responder subject (that is, a subject having AML and previously found to be susceptible to treatment with an agent capable of inhibiting or reversing EMT or a chemotherapeutic agent) this is indicative of a lack of susceptibility to treatment with an agent capable of inhibiting or reversing EMT or a chemotherapeutic agent.

[0105] In embodiments in which the control profile is: a predetermined profile of “standard ranges” of biomarker expression, activity, or amount values obtained from non-responder subjects; then, if the expression, activity, or amount values in the sample profile are within the “standard range” of values typical of a non-responder subject (that is, a subject having AML and previously found to lack susceptibility to treatment with an agent capable of inhibiting or reversing EMT or a chemotherapeutic agent) this is indicative of a lack of susceptibility to treatment with an agent capable of inhibiting or reversing EMT or a chemotherapeutic agent. Similarly, if the expression, activity, or amount values in the sample profile are outside the “standard range” of values typical of a non-responder subject (that is, a subject having AML and previously found to lack susceptibility to treatment with an agent capable of inhibiting or reversing EMT or a chemotherapeutic agent) this may be indicative of susceptibility to treatment with an agent capable of inhibiting or reversing EMT or a chemotherapeutic agent.

[0106] In embodiments in which the control profile is: obtained from a population of control subjects not having AML; then, if the expression, activity, or amount values in the sample profile are outside a “standard range” of values typical of subjects not having AML, this is indicative of susceptibility to treatment with an agent capable of inhibiting or reversing EMT or a chemotherapeutic agent. Similarly, if the expression, activity, or amount values in the sample profile are within a “standard range” of values typical of subjects not having AML, this is indicative of a lack of susceptibility to treatment with an agent capable of inhibiting or reversing EMT or a chemotherapeutic agent. In such cases, an expression, activity or amount value may be outside the “standard range” of values when it is either above the upper limit of normal or below the lower limit of normal for a given biomarker. The upper limit of normal and lower limit of normal are the limits of the normal distribution of a given biomarker in a population of control subjects not having AML.

[0107] The skilled person is readily able to determine whether the sample profile is indicative of susceptibility or lack of susceptibility to treatment with an agent capable of inhibiting or reversing EMT or a chemotherapeutic agent using suitable statistical tools and comparison with the appropriate control.

[0108] In some embodiments the sample profile may be compared with two or more control profiles as described above.

[0109] As used herein, the term “one or more” means 1, 2, 3, 4, 5, 6, 7, 8, 9, 10, 11, 12, 13, 14, 15, 16, 17, 18, 19, or 20 of the biomarkers described herein. In some embodiments the one or more biomarker is Axl. In some embodiments the one or more biomarker is FGF-21. In some embodiments the one or more biomarker is RAGE. In some embodiments the one or more biomarker is CEA. In some embodiments the one or more biomarker is FSH. In some embodiments the one or more biomarker is MMP-10. In some embodiments the one or more biomarker is Omentin. In some embodiments the one or more biomarker is CA-19-9. In some embodiments the one or more biomarker is LH. In some embodiments the one or more biomarker is Haptoglobin. In some embodiments the one or more biomarker is NAP-2. In some embodiments the one or more biomarker is IgE. In some embodiments the one or more biomarker is CD40-L.

[0110] In some embodiments the method may comprise assessing the activity, expression, or amount of at least 2, 3, 4, 5, 6, 7, 8, 9, 10, 11, 12, 13, 14, 15, 20 of said biomarkers in the subject, or in a sample derived from the subject. In some embodiments the method may comprise assessing the activity, expression, or amount of Axl and at least 1, 2, 3, 4, 5, 6, 7, 8, 9, 10, 11, 12, 13, 14, 15, 20 further biomarkers described herein in the subject, or in a sample derived from the subject.

[0111] Subject

[0112] A “subject” as referred to herein is any species of animal classified as a mammal, and includes but is not restricted to, domestic and farm animals, primates and humans. In some preferred embodiments the subject is a human of any sex or race. In some embodiments, the human is an adult human.

[0113] In some embodiments the predictive methods described herein are performed before the subject receives a treatment or course of treatment for AML. In other embodiments the predictive method is performed during or after a treatment or course of treatment for AML. In some embodiments the treatment or course of treatment for AML is an agent capable of inhibiting or reversing EMT. In other embodiments the treatment or course of treatment for AML is a chemotherapeutic treatment that is not an agent capable of inhibiting or reversing EMT.

[0114] In some embodiments of the predictive methods described herein the subject has previously been treated with an agent capable of inhibiting or reversing EMT or a chemotherapeutic agent. In some embodiments the subject has previously been treated with an agent selected from: a PHGDH inhibitor, a Slfn11 inhibitor, an Axl inhibitor, or an Akt3 inhibitor.

[0115] In some embodiments of the predictive methods described herein the subject has previously been treated with an agent that is different to the agent capable of inhibiting or reversing EMT or chemotherapeutic agent for which the subject's response is being predicted. That is, the subject has previously been treated with an agent that is not the agent which the predictive method is determining the subject's susceptibility to. Accordingly, in some embodiments, the subject has not previously been treated with an agent capable of inhibiting or reversing EMT or a chemotherapeutic agent. In some preferred embodiments, the subject has not previously been treated with an Axl inhibitor. In other preferred embodiments, the subject has not previously been treated with an Akt3 inhibitor.

[0116] Post-Treatment Changes in Biomarkers

[0117] In some embodiments of this aspect of the disclosure, the predictive method further comprises a subsequent step of assessing the activity, expression, or amount of one or more biomarker in the subject, or in a sample derived from the subject, to obtain a second sample profile of one or more of the biomarkers described herein after the subject has received a treatment or course of treatment an agent capable of inhibiting or reversing EMT or a chemotherapeutic agent.

[0118] That is, in some embodiments, the predictive method comprises:
[0119] (a) determining if a subject is susceptible to treatment with an agent capable of inhibiting or reversing EMT or a chemotherapeutic agent by assessing the activity, expression, or amount of one or more biomarker in the subject, as outlined above;
[0120] (b) administering to the subject a therapeutically effective amount of an agent capable of inhibiting or reversing EMT or a chemotherapeutic agent; and
[0121] (c) subsequently assessing the activity, expression, or amount of one or more biomarker in the subject, or in a sample derived from the subject.

[0122] In some embodiments, the predictive method comprises:
[0123] (a) determining if a subject is susceptible to treatment with an agent capable of inhibiting or reversing EMT or a chemotherapeutic agent by assessing the activity, expression, or amount of one or more biomarker in the subject, or in a sample derived from the subject, wherein the one or more biomarker is selected from the group consisting of: Axl, FGF-21, RAGE, CEA, FSH, MMP-10, Omentin, CA-19-9, LH, Haptoglobin, NAP-2, IgE, and/or CD40-L.;
[0124] (b) administering to the subject a therapeutically effective amount of an agent capable of inhibiting or reversing EMT or a chemotherapeutic agent; and
[0125] (c) subsequently assessing the activity, expression, or amount of one or more biomarker in the subject, or in a sample derived from the subject.

[0126] In some preferred embodiments the methods comprise subsequently assessing the activity, expression, or amount of Axl in the subject, or in a sample derived from the subject. In some embodiments an increase in the activity, expression, or amount of Axl in the second sample profile as compared with a control profile after contacting the subject with a cancer therapeutic agent is indicative of higher susceptibility to treatment with an agent capable of inhibiting or reversing EMT or a chemotherapeutic agent. In some preferred embodiments the control profile is obtained from the same subject prior to treatment with an agent capable of inhibiting or reversing EMT or a chemotherapeutic agent.

[0127] Post-Treatment Predictive Biomarkers and Methods

[0128] By analysing patient data obtained from clinical trial BGBC003 (NCT02488408), the authors have discovered that, following treatment of subjects having AML with an agent capable of inhibiting or reversing EMT or a chemotherapeutic agent, the levels of certain of the biomarkers described herein increases in the serum of “responder” subjects but not in the serum of “non-responder” subjects—see Example 1. Similarly, following treatment with an agent capable of inhibiting or reversing EMT or a chemotherapeutic agent, the levels of certain of the biomarkers described herein decreases in the serum of “responder” subjects but not in the serum of “non-responder” subjects. Thus, by assessing the activity, expression, or amount of one or more of the biomarkers described herein prior to and following treatment with an agent capable of inhibiting or reversing EMT or a chemotherapeutic agent it is possible to determine or confirm that the subject is susceptible or responsive to treatment with said agent.

[0129] Accordingly, in a second aspect of this facet the disclosure provides a method of predicting a cancer-related outcome in a subject having, suspected of having, or diagnosed with acute myelocytic leukemia (AML), the method comprising assessing the activity, expression, or amount of one or more of the biomarkers described herein in a subject, or in a sample derived from the subject after the subject has been contacted with an agent capable of inhibiting or reversing EMT or a chemotherapeutic agent. In some embodiments the cancer-related outcome is susceptibility to treatment with an agent capable of inhibiting or reversing EMT or a chemotherapeutic agent.

[0130] In some embodiments the method comprises assessing the activity, expression, or amount of one or more of the biomarkers described herein in the subject, or in a sample derived from the subject, to obtain a sample profile of the one or more biomarker; and, making a prediction based on the sample profile of the one or more biomarker. In some embodiments of the method the prediction is made by comparing the sample profile to a control profile. In preferred embodiments the sample profile is obtained after contacting the subject with an agent capable of inhibiting or reversing EMT or a chemotherapeutic agent.

[0131] A “control profile” as used herein is a profile of numerical values or numerical ranges corresponding to the activity, expression, or amount of the same biomarkers as for the sample profile, determined in a control subject or population of control subjects.

[0132] In preferred embodiments of this aspect of the disclosure the control profile is obtained from the same subject prior to treatment with an agent capable of inhibiting or reversing EMT or a chemotherapeutic agent. In some embodiments the control profile is obtained from a population of control subjects having AML. In other embodiments, the control profile is a predetermined profile of biomarker expression, activity, or amount values, for example a profile of “threshold” values or “standard ranges” of values.

[0133] Accordingly, in embodiments in which the control profile is obtained from the same subject prior to treatment with an agent capable of inhibiting or reversing EMT or a chemotherapeutic agent, an increase in the activity, expression, or amount of one or more biomarker in the sample profile as compared with a control profile after contacting the subject with an agent capable of inhibiting or reversing EMT or a cancer therapeutic agent may be indicative of susceptibility to treatment with an agent capable of inhibiting or reversing EMT or a chemotherapeutic agent. In such embodiments, a decrease in the activity, expression, or amount of one or more biomarker in the sample profile as compared with a control profile after contacting the subject with a cancer therapeutic agent may be indicative of higher susceptibility to treatment with an agent capable of inhibiting or reversing EMT or a chemotherapeutic agent.

[0134] In some such embodiments, an increase in the activity, expression, or amount of one or more biomarker in the sample profile as compared with a control profile after contacting the subject with a cancer therapeutic agent may be indicative of lower susceptibility to treatment with an agent capable of inhibiting or reversing EMT or a chemotherapeutic agent. In some such embodiments, a decrease in the activity, expression, or amount of one or more biomarker in the sample profile as compared with a control profile after contacting the subject with a cancer therapeutic agent may be indicative of lower susceptibility to treatment with an agent capable of inhibiting or reversing EMT or a chemotherapeutic agent.

[0135] In some preferred embodiments the one or more biomarker includes at least Axl. In some embodiments the one or more biomarker is Axl. In some embodiments an increase in the activity, expression, or amount of Axl in the sample profile as compared with a control profile after contacting the subject with a cancer therapeutic agent is indicative of higher susceptibility to treatment with an agent capable of inhibiting or reversing EMT or a chemotherapeutic agent.

[0136] Subject

[0137] A “subject” as referred to herein is any species of animal classified as a mammal, and includes but is not restricted to, domestic and farm animals, primates and humans. In some preferred embodiments the subject is a human of any sex or race. In some embodiments, the human is an adult human.

[0138] In some embodiments of this aspect of the disclosure, the subject was selected for treatment with the agent capable of inhibiting or reversing EMT or a chemotherapeutic agent, using a predictive method according to the first aspect of the disclosure outlined above.

[0139] Agents Capable of Inhibiting or Reversing EMT

[0140] The present disclosure provides methods for predicting a cancer-related outcome in a subject having, suspected of having, or diagnosed with acute myelocytic leukemia (AML). A “cancer-related outcome” is a clinical prediction or prognosis associated with cancer.

[0141] In some embodiments the cancer-related outcome is susceptibility to treatment with an agent capable of inhibiting or reversing EMT or a chemotherapeutic agent. The term “agent capable of inhibiting EMT” (used interchangeably with the term “EMT inhibitor”) as used herein means an agent that prevents or reduces the rate of the epithelial-mesenchymal transition (EMT). The term “agent capable of reversing EMT” as used herein means an agent which promotes the reverse of EMT, that is, promotes the mesenchymal-to-epithelial (MET) transition.

[0142] Agents capable of inhibiting or reversing EMT include inhibitors of the Axl kinase (Axl inhibitors) and inhibitors of the Akt3 kinase (Akt3 inhibitors). Accordingly, in some embodiments the agent capable of inhibiting or reversing EMT or chemotherapeutic agent is an Axl inhibitor, Akt3 inhibitor, Slfn11 inhibitor, or PHGDH inhibitor. In the most preferred embodiments the agent capable of inhibiting or reversing EMT or chemotherapeutic agent is an Axl inhibitor.

[0143] Axl inhibitors include, for example the small molecule Axl inhibitor BGB324/R428/bemcentinib, as well as cabozantinib, TP-0903, foretinib, merestinib, bosutinib, gilteritinib, crizotinib, amuvatinib, sunitinib, sitravatinib, LDC1267, and UNC2025. Other Axl inhibitors include the anti-Axl antibodies described in WO2015/193428, WO2015/193430, WO2016/097370, and WO2016/166296. In some preferred embodiments the Axl inhibitor is an anti-Axl antibody described in WO2015/193428, WO2015/193430, WO2016/097370, or WO2016/166296. In some particularly preferred embodiments the Axl inhibitor is BGB324/R428/bemcentinib.

[0144] In preferred embodiments, the agent capable of inhibiting or reversing EMT or chemotherapeutic agent is an Akt3 inhibitor. Akt3 inhibitors are described, for example in WO2016/102672. Accordingly, in some embodiments, the agent capable of inhibiting or reversing EMT or chemotherapeutic agent is an Akt3 inhibitor described in WO2016/102672.

[0145] In some embodiments the agent capable of inhibiting or reversing EMT is not an Akt3 inhibitor. In some embodiments the agent capable of inhibiting or reversing EMT is not a Slfn11 inhibitor. In some embodiments the agent capable of inhibiting or reversing EMT is not a PHGDH inhibitor.

[0146] In some embodiments of the predictive methods described herein, the agent capable of inhibiting or reversing EMT is administered as a single agent. In some other embodiments, the agent capable of inhibiting or reversing EMT is administered in combination with a further cancer treatment.

[0147] Suitable further cancer treatments include but are not limited to:
[0148] (i) alkylating agents, including alkyl sulfonates such as busulfan;
[0149] (ii) nitrogen mustards such as chlorambucil, cyclophosphamide, estramustine, ifosfamide, mechlorethamine, melphalan, and uramustine;
[0150] (iii) ethyleneimine derivatives such as thiotepa;
[0151] (iv) nitrosoureas such as carmustine, lomustine, and streptozocin;
[0152] (v) triazenes such as dacarbazine, procarbazine, and temozolamide;
[0153] (vi) platinum compounds such as cisplatin, carboplatin, oxaliplatin, satraplatin, and picoplatin onnaplatin, tetraplatin, sprioplatin, iproplatin, chloro(diethylenediamino)-platinum (II) chloride, dichloro(ethylenediamino)-platinum (II), diamino(2-ethylmalonato)platinum (II), (1,2-diaminocyclohexane)malonatoplatinum (II), (4-carboxyphthalo)-(1,2-diaminocyclohexane)platinum (II), (1,2-diaminocyclohexane)-(isocitrato)platinum (II), and (1,2-diaminocyclohexane)-cis-(pyruvato)platinum (II);
[0154] (vii) antimetabolites, including antifolates such as methotrexate, permetrexed, raltitrexed, and trimetrexate;
[0155] (viii) pyrimidine analogues such as azacitidine, capecitabine, cytarabine, edatrexate, floxuridine, fluorouracil, gemcitabine, and troxacitabine;
[0156] (ix) purine analogues such as cladribine, chlorodeoxyadenosine, clofarabine, fludarabine, mercaptopurine, pentostatin, and thioguanine;
[0157] (x) natural products, including antitumor antibiotics such as bleomycin, dactinomycin, mithramycin, mitomycin, mitoxantrone, porfiromycin;
[0158] (xi) anthracyclines such as daunorubicin, doxorubicin, epirubicin, idarubicin, and valrubicin;
[0159] (xii) mitotic inhibitors such as the vinca alkaloids vinblastine, vinvesir, vincristine, vindesine, and vinorelbine;
[0160] (xiii) enzymes such as L-asparaginase and PEG-L-asparaginase;
[0161] (xiv) microtubule polymer stabilizers such as the taxanes paclitaxel and docetaxel;
[0162] (xv) topoisomerase I inhibitors such as the camptothecins irinotecan and topotecan;
[0163] (xvi) topoisomerase II inhibitors such as podophyllotoxin, amsacrine, etoposide, teniposide, losoxantrone and actinomycin;
[0164] (xvii) hormones and hormone antagonists, including
   [0165] androgens such as fluoxymesterone and testolactone;
   [0166] antiandrogens such as bicalutamide, cyproterone, flutamide, and nilutamide;
   [0167] corticosteroids such as dexamethasone and prednisone;
   [0168] aromatase inhibitors such as aminoglutethimide, anastrozole, exemestane, formestane, and letrozole;
   [0169] estrogens such as diethylstilbestrol;
   [0170] antiestrogens such as fulvestrant, raloxifene, tamoxifen, and toremifine;
   [0171] luteinising hormone-releasing hormone (LHRH) agonists and antagonists such as abarelix, buserelin, goserelin, leuprolide, histrelin, desorelin, nafarelin acetate and triptorelin;
   [0172] progestins such as medroxyprogesterone acetate and megestrol acetate; and
   [0173] thyroid hormones such as levothyroxine and liothyronine;
[0174] (xviii) PKB pathway inhibitors, including perifosine, enzastaurin hydrochloride, and triciribine;
[0175] (xix) P13K inhibitors such as semaphore and SF1126, and MTOR inhibitors such as rapamycin and analogues;
[0176] (xx) CDK inhibitors, including seliciclib, alvocidib, and 7-hydroxystaurosporine;
[0177] (xxi) COX-2 inhibitors, including celecoxib;
[0178] (xxii) HDAC inhibitiors, including trichostatin A, suberoylanilide hydroxamic acid, and chlamydocin;
[0179] (xxiii) DNA methylase inhibitors, including temozolomide, and miscellaneous agents, including altretamine, arsenic trioxide, thalidomide, lenalidomide, gallium nitrate, levamisole, mitotane, hydroxyurea, octreotide, procarbazine, suramin, photodynamic compounds such as methoxsalen and sodium porfimer;
[0180] (xxiv) proteasome inhibitors such as bortezomib;
[0181] (xxv) molecular targeted therapy agents including: functional therapeutic agents, including gene therapy agents and antisense therapy agents;
[0182] (xxvi) tyrosine kinase inhibitors such as erlotinib hydrochloride, gefitinib, imatinib mesylate, and semaxanib;
[0183] (xxvii) Raf inhibitors such as sorafenib, and gene expression modulators such as the retinoids and rexinoids, for example adapalene, bexarotene, trans-retinoic acid, 9-cis-retinoic acid, and N-(4-hydroxyphenyl)retinamide;
[0184] (xxviii) phenotype-directed therapy agents, including monoclonal antibodies such as pembrolizumab, alemtuzumab, bevacizumab, cetuximab, ibritumomab tiuxetan, rituximab, and trastuzumab, immunotoxins such as gemtuzumab ozogamicin, radioimmunoconjugates such as I-tositumobab;
[0185] (xxix) cancer vaccines;
[0186] (xxx) biologic therapy agents including: interferons such as interferon-[alpha]2a and interferon-[alpha]2b, and interleukins such as aldesleukin, denileukin diftitox, and oprelvekin;
[0187] (xxxi) anticancer therapies involving the use of protective or adjunctive agents, including: cytoprotective agents such as amifostine, and dexrazoxane, phosphonates such as pamidronate and zoledronic acid, and stimulating factors such as epoetin, darbeopetin, filgrastim, PEG-filgrastim, and sargramostim;
[0188] (xxxii) Axl inhibitors such as 1-(6,7-dihydro-5H-benzo[6,7]cyclohepta[1,2-c]pyridazin-3-yl)-N3-((7-(S)-pyrrolidin-1-yl)-6,7,8,9-tetrahydro-5H-benzo[7]annulene-2-yl)-1H-1,2,4-triazole-3,5-diamine; and/or
[0189] (xxxiii) further combination chemotherapeutic regimens, such as combinations of carboplatin/paclitaxel, capecitabine/docetaxel, fluorauracil/levamisole, fluorauracil/leucovorin, methotrexate/leucovorin, and trastuzumab/paclitaxel, alone or in further combination with carboplatin.

[0190] In some preferred embodiments the further cancer treatment is a pyrimidine analogue, for example azacitidine, capecitabine, cytarabine, edatrexate, floxuridine, fluorouracil, gemcitabine, or troxacitabine, or a cytidine analogue, for example decitabine. In some particularly preferred embodiments the further cancer treatment is cytarabine. In other particularly preferred embodiments the further cancer treatment is decitabine.

[0191] Assessing Biomarker Activity, Expression, Amount

[0192] In some embodiments of the predictive methods described herein, assessing the activity, expression, or amount of one or more biomarker in a subject, or in a sample derived from a subject, comprises: contacting a sample, or an extract from a sample, with at least 1, 2, 3, 4, 5, 6, 7, 8, 9, 10 or more reagents for detecting the activity, expression, or amount of one or more biomarkers, each of which is selective for a particular biomarker; and, detecting and/or quantifying said reagents for detecting.

[0193] In some preferred embodiments, assessing the expression or amount of the one or more biomarker comprises determining the level of the one or more biomarker protein or mRNA in the subject or sample derived from the subject. Preferably the expression or amount of the one or more biomarker is assessed by determining the level of protein expression. In particularly preferred embodiments the expression or amount of the one or more biomarker is assessed by determining the level of protein expression in serum.

[0194] The term “expression” refers to the transcription of a gene's DNA template to produce the corresponding mRNA and translation of this mRNA to produce the corresponding gene product (i.e., a peptide, polypeptide, or protein) as well as the “expression” of a protein in one or more forms that may have been modified post translation.

[0195] In some embodiments determining the level of the one or more biomarker protein or mRNA comprises: contacting a sample, or an extract from a sample, with at least 1, 2, 3, 4, 5, 6, 7, 8, 9, 10 or more specific binding members, each of which selectively binds to a respective biomarker protein or mRNA; and, detecting and/or quantifying formation of complex formed by said specific binding member and said biomarker protein or mRNA. In some embodiments the specific binding member may comprise an antibody molecule or a binding fragment thereof.

[0196] A range of suitable techniques for determining protein and mRNA expression levels are well known in the art, for example microarray analysis, Western blotting, and PCR techniques such as QPCR. In some embodiments, determining the expression or amount of the one or more biomarker protein or mRNA may comprise use of a technique selected from: Western blot; enzyme-linked immunosorbent assay (ELISA); radioimmunoassay (RIA); competitive enzyme immunoassay; double antibody sandwich ELISA (DAS-ELISA); liquid immunoarray technology; immunocytochemistry; immunohistochemistry; antibody microarray detection; precipitation of colloidal gold; affinity chromatography; ligand binding assay; and lectin binding assay.

[0197] In some embodiments, the expression or amount of the one or more biomarker is determined as an absolute amount of the respective biomarker protein or mRNA in the sample. In such cases, the respective biomarker protein or mRNA may be quantified in the sample and the amount expressed as a measure of the sample, for example the volume, mass, or total protein content of the sample.

[0198] In some embodiments, the expression or amount of the one or more biomarker is determined as a relative amount of the respective biomarker protein or mRNA in the sample, wherein the relative amount is determined relative to a reference protein or mRNA in the sample. Determining the relative amount of biomarker protein or mRNA in this way allows for normalisation to, e.g., account for differences in total protein concentration and to remove bias from sample to sample.

[0199] Preferably the reference protein or mRNA is one whose expression or amount does not vary significantly between subjects having cancer and subjects not having cancer, in particular AML. That is, the reference protein or mRNA is preferably one whose expression or amount is not altered by AML. Accordingly, the reference protein or mRNA may comprise one or more protein or mRNA which is not one of the biomarkers described herein. When expressing the expression or amount of the one or more biomarker as a relative amount, the absolute amount of the respective biomarker protein or mRNA in the sample may be divided by the absolute amount of the reference protein or mRNA in the sample.

[0200] Assessing Biomarker Expression at the RNA Level

[0201] Gene expression can be detected at the RNA level. RNA may be extracted from cells using RNA extraction techniques including, for example, using acid phenol/guanidine isothiocyanate extraction (RNAzol B; Biogenesis), RNeasy RNA preparation kits (Qiagen) or PAXgene (PreAnalytix, Switzerland). Typical assay formats utilising ribonucleic acid hybridisation include nuclear run-on assays, RT-PCR, RNase protection assays (Melton et al., Nuc. Acids Res. 12:7035), Northern blotting and In Situ hybridization. Gene expression can also be detected by microarray analysis as described below.

[0202] Assessing Biomarker Expression at the Protein Level

[0203] Preferably biomarker level is assessed by measuring protein expression. Altered gene or protein expression may also be detected by measuring the polypeptides encoded by the gene. This may be achieved by using molecules which bind to the polypeptides encoded by the biomarker gene. Suitable molecules/agents which bind either directly or indirectly to the polypeptides in order to detect the presence of the protein include naturally occurring molecules such as peptides and proteins, for example antibodies, or they may be synthetic molecules.

[0204] Antibodies may be derived from commercial sources or through techniques which are familiar to those skilled in the art. In one embodiment, and where altered expression manifests itself through the expression of alteration of post translationally-modified forms of a protein biomarker, antibodies specific for those different forms may be used. For the purposes of this disclosure, the term “antibody”, unless specified to the contrary, includes whole antibodies, or fragments of whole antibodies which retain their binding activity for a target antigen. Such fragments include Fv, F(ab′) and F(ab′)2 fragments, as well as single chain antibodies (scFv). Furthermore, the antibodies and fragments thereof may be humanised antibodies, for example as described in EP239400A. For example: monoclonal and polyclonal antibodies, recombinant antibodies, proteolytic and recombinant fragments of antibodies (Fab, Fv, scFv, diabodies), single-domain antibodies (VHH, sdAb, nanobodies, IgNAR, VNAR), and proteins unrelated to antibodies, which have been engineered to have antibody-like specific binding. Antibodies may be bound to a solid support and/or packaged into kits in a suitable container along with suitable reagents, controls, instructions and the like.

[0205] Arrays

[0206] Array technology and the various techniques and applications associated with it are well known in the art. Array technology overcomes the disadvantages with traditional methods in molecular biology, which generally work on a “one gene in one experiment” basis, resulting in low throughput and the inability to appreciate the “whole picture” of gene function. In the context of the products and methods of the present disclosure, array technology can be used, for example, in the analysis of the expression of biomarker proteins or mRNA.

[0207] In general, any library or group of samples may be arranged in an orderly manner into an array, by spatially separating the members of the library or group. Examples of suitable libraries for arraying include nucleic acid libraries (including DNA, cDNA, oligonucleotide, etc. libraries), peptide, polypeptide and protein libraries, as well as libraries comprising any molecules, such as ligand libraries, among others. Accordingly, where reference is made to a “library” in this document, unless the context dictates otherwise, such reference should be taken to include reference to a library in the form of an array.

[0208] Proteins, polypeptides, etc., may also be immobilised in arrays. For example, antibodies have been used in microarray analysis of the proteome using protein chips (Borrebaeck C A, 2000, Immunol Today 21(8):379-82). Polypeptide arrays are reviewed in, for example, MacBeath and Schreiber, 2000, Science, 289(5485):1760-1763.

[0209] Sample

[0210] Suitable samples include, but are not limited to, tissue samples such as tissue biopsy, blood, urine, buccal scrapes etc., as well as serum, plasma, or tissue culture supernatant samples. In preferred embodiments the expression or amount of the one or more biomarker is assessed by determining the level of protein expression in the sample. In some preferred embodiments the sample is a blood, serum, or plasma sample. In some particularly preferred embodiments the sample is a serum sample.

[0211] When assessing the expression or amount of the one or more biomarker proteins or mRNA in serum or plasma samples derived from a subject, samples are removed and subjected to analytical techniques such as flow cytometry, mass cytometry (CyTOF), ELISA, PET, and SELDI-TOF MS. In some embodiments, the method may comprise extracting RNA from said sample and detecting gene expression by QPCR. In some other embodiments, gene expression may be detected by detecting protein products by, for example, Western Blot.

[0212] In some embodiments, the level of expression of the one or more biomarker is assessed by determining the copy number of the gene encoding the one or more biomarker. Copy number (i.e. gene duplication events) may be determined using standard techniques known in the art, e.g. using a DNA chip as described in Jiang et al. (Jiang Q, Ho Y Y, Hao L, Nichols Berrios C, Chakravarti A. Copy number variants in candidate genes are genetic modifiers of Hirschsprung disease. PLoS One. 2011; 6(6)).

[0213] Is some preferred embodiments of the predictive methods described herein, the method is performed in vitro or ex vivo.

[0214] Methods of Selecting a Subject for Treatment

[0215] A third aspect of this facet of the present disclosure relates to methods of selecting subjects having, suspected of having, or diagnosed with acute myelocytic leukemia (AML) for treatment with an agent capable of inhibiting or reversing EMT or a chemotherapeutic agent. In some embodiments the method comprises: identifying subjects susceptible to treatment with an agent capable of inhibiting or reversing EMT or a chemotherapeutic agent using a predictive method defined in accordance with the above described first and second aspects of the disclosure; and, selecting thus identified subjects for treatment.

[0216] In some embodiments this aspect relates to methods of selecting subjects having, suspected of having, or diagnosed with acute myelocytic leukemia (AML) for continued treatment with an agent capable of inhibiting or reversing EMT or a chemotherapeutic agent. In some embodiments the method comprises: identifying subjects susceptible to treatment with an agent capable of inhibiting or reversing EMT or a chemotherapeutic agent using a predictive method defined in accordance with the above described second aspect of the disclosure; and, selecting thus identified subjects for treatment.

[0217] In some embodiments of this aspect of the disclosure, the treatment comprises administering to the subject a therapeutically effective amount of an agent capable of inhibiting or reversing EMT or a chemotherapeutic agent as described herein. Accordingly, in some embodiments the treatment comprises an Axl inhibitor, Akt3 inhibitor, Slfn11 inhibitor, or PHGDH inhibitor. In some preferred embodiments the treatment comprises an Axl inhibitor, for example, BGB324/R428/bemcentinib, cabozantinib, TP-0903, foretinib, merestinib, bosutinib, gilteritinib, crizotinib, amuvatinib, sunitinib, sitravatinib, LDC1267, or UNC2025. Other Axl inhibitors include the anti-Axl antibodies described in WO2015/193428, WO2015/193430, WO2016/097370, and WO2016/166296. In some preferred embodiments the Axl inhibitor is an anti-Axl antibody described in WO2015/193428, WO2015/193430, WO2016/097370, or WO2016/166296. In some particularly preferred embodiments the Axl inhibitor is BGB324/R428/bemcentinib.

[0218] In some other preferred embodiments, the treatment comprises an Akt3 inhibitor. In some embodiments the Akt3 inhibitor is an Akt3 inhibitor disclosed in WO2016/102672.

[0219] In some embodiments of this aspect of the disclosure, the treatment is administered as a single agent. In other embodiments, the treatment is administered in combination with a further cancer treatment. Suitable further cancer treatments are outlined in detail above. In some embodiments the further cancer treatment is a pyrimidine analogue, for example azacitidine, capecitabine, cytarabine, edatrexate, floxuridine, fluorouracil, gemcitabine, or troxacitabine, or a cytidine analogue, for example decitabine. In some particularly preferred embodiments the further cancer treatment is cytarabine. In other particularly preferred embodiments the further cancer treatment is decitabine.

[0220] Kits

[0221] A fourth aspect of this facet of the present disclosure relates to diagnostic kits and test devices. In some embodiments the disclosure provides a diagnostic kit comprising 1, 2, 3, 4, 5, 6, 7, 8, 9, 10 or more reagents for detecting the activity, expression, or amount of one or more of the biomarkers described herein, each of which is selective for a particular biomarker. In some embodiments each of the reagents for detecting is selective for a biomarker selected from the group consisting of: Axl, FGF-21, RAGE, CEA, FSH, MMP-10, Omentin, CA-19-9, LH, Haptoglobin, NAP-2, IgE, and/or CD40-L.

[0222] In other embodiments the disclosure provides a test device comprising 1, 2, 3, 4, 5, 6, 7, 8, 9, 10 or more reagents for detecting the activity, expression, or amount of one or more of the biomarkers described herein, each of which is selective for a particular biomarker. In some embodiments each of the reagents for detecting is selective for a biomarker selected from the group consisting of: Axl, FGF-21, RAGE, CEA, FSH, MMP-10, Omentin, CA-19-9, LH, Haptoglobin, NAP-2, IgE, and/or CD40-L.

[0223] In some embodiments the diagnostic kit or test device comprises 1, 2, 3, 4, 5, 6, 7, 8, 9, 10 or more specific binding members, each of which selectively binds to one of the biomarkers described herein; and, one or more reagents for detecting said one or more specific binding members, or one or more reagents for detecting and/or quantifying formation of a complex formed by said specific binding member and said biomarker. In some embodiments each specific binding member selectively binds to a biomarker selected from the group consisting of: Axl, FGF-21, RAGE, CEA, FSH, MMP-10, Omentin, CA-19-9, LH, Haptoglobin, NAP-2, IgE, and/or CD40-L.

[0224] In some embodiments the diagnostic kit or test device comprises a specific binding member which selectively binds to Axl, and at least 1, 2, 3, 4, 5, 6, 7, 8, 9, 10, or more specific binding members, each of which selectively binds to a biomarker selected from the group consisting of: FGF-21, RAGE, CEA, FSH, MMP-10, Omentin, CA-19-9, LH, Haptoglobin, NAP-2, IgE, and/or CD40-L.

[0225] In some embodiments of this aspect of the disclosure the diagnostic kit or test device comprises a plurality of said specific binding members provided in the form of an array on a substrate or conjugated to a plurality of particles, such as beads or microspheres. The particles may be encoded with a detectable label. In some embodiments the specific binding member comprises an antibody molecule or a binding fragment thereof.

[0226] In some embodiments of the diagnostic kit or test device detecting formation of a complex formed by a specific binding member and a biomarker is carried out by use of a technique selected from: Western blot; enzyme-linked immunosorbent assay (ELISA); radioimmunoassay (RIA); competitive enzyme immunoassay; double antibody sandwich ELISA (DAS-ELISA); liquid immunoarray technology; immunocytochemistry; immunohistochemistry; antibody microarray detection; precipitation of colloidal gold; affinity chromatography; ligand binding assay; and lectin binding assay.

[0227] In some embodiments of the diagnostic kit or test device, the kit or test device comprises no more than 15, 20, 25, 30, 40, or 50 reagents for detecting. In some embodiments of the diagnostic kit or test device, the kit or test device comprises no more than 15, 20, 25, 30, 40, or 50 specific binding members.

[0228] The present disclosure also provides use of such diagnostic kits and test devices in methods of predicting a cancer-related outcome in a subject. In preferred embodiments the cancer-related outcome is susceptibility to treatment with an agent capable of inhibiting or reversing EMT or a chemotherapeutic agent as described herein.

[0229] In some embodiments the agent capable of inhibiting or reversing EMT or chemotherapeutic agent is an Axl inhibitor, Akt3 inhibitor, Slfn11 inhibitor, or PHGDH inhibitor. In some preferred embodiments the agent capable of inhibiting or reversing EMT or chemotherapeutic agent is an Axl inhibitor, for example BGB324/R428/bemcentinib, cabozantinib, TP-0903, foretinib, merestinib, bosutinib, gilteritinib, crizotinib, amuvatinib, sunitinib, sitravatinib, LDC1267, or UNC2025. Other Axl inhibitors include the anti-Axl antibodies described in WO2015/193428, WO2015/193430, WO2016/097370, and WO2016/166296. In some preferred embodiments the Axl inhibitor is an anti-Axl antibody described in WO2015/193428, WO2015/193430, WO2016/097370, or WO2016/166296. In some particularly preferred embodiments the Axl inhibitor is BGB324/R428/bemcentinib.

[0230] In some embodiments of the diagnostic kit or test device for use in a predictive method, the subject has, is suspected of having, or has been diagnosed with AML.

[0231] In some embodiments the method may be as defined in accordance with the above described first and second aspects of the disclosure.

[0232] A fifth aspect of this facet of the present disclosure relates to the use of a reagent for detecting the activity, expression, or amount of a biomarker selected from the group consisting of: Axl, FGF-21, RAGE, CEA, FSH, MMP-10, Omentin, CA-19-9, LH, Haptoglobin, NAP-2, IgE, and/or CD40-L, in a method of predicting a cancer-related outcome in a subject.

[0233] A sixth aspect of this facet of the disclosure relates to the use of 1, 2, 3, 4, 5, 6, 7, 8, 9, 10 or more reagents for detecting the activity, expression, or amount a biomarker, each of which is selective for a particular biomarker selected from the group consisting of: Axl, FGF-21, RAGE, CEA, FSH, MMP-10, Omentin, CA-19-9, LH, Haptoglobin, NAP-2, IgE, and/or CD40-L, in a method of manufacture of a diagnostic kit or test device for use in a method of predicting a cancer-related outcome in a subject. In some embodiments of these uses the reagent for detecting comprises a specific binding member selective for a particular biomarker. The specific binding member may comprise an antibody molecule or a binding fragment thereof.

[0234] In some embodiments the method may be as defined in accordance with the above described first and second aspects of this facet of the disclosure.

[0235] Uses

[0236] A seventh aspect of this facet of the present disclosure relates to the use of one or more of: Axl, FGF-21, RAGE, CEA, FSH, MMP-10, Omentin, CA-19-9, LH, Haptoglobin, NAP-2, IgE, and/or CD40-L, as a biomarker for determining if a subject is susceptible to treatment with an agent capable of inhibiting or reversing EMT or a chemotherapeutic agent.

[0237] In some embodiments the use relates to use of Axl, and at least 1, 2, 3, 4, 5, 6, 7, 8, 9, 10, or more of: FGF-21, RAGE, CEA, FSH, MMP-10, Omentin, CA-19-9, LH, Haptoglobin, NAP-2, IgE, and/or CD40-L, as a biomarker for determining if a subject is susceptible to treatment with an agent capable of inhibiting or reversing EMT or a chemotherapeutic agent.

[0238] In some embodiments the use is as a biomarker in a method as defined in accordance with the above described first and second aspects of this facet of the disclosure.

[0239] Methods of Treating a Subject

[0240] An eighth aspect of this facet of the present disclosure relates to methods of treating a subject having, suspected of having, or diagnosed with acute myelocytic leukemia (AML). In some embodiments the method comprises: identifying a subject for treatment using a predictive method defined in accordance with the above described first and second aspects of this facet of the disclosure; and, administering to the subject a therapeutically effective amount of an agent capable of inhibiting or reversing EMT or a chemotherapeutic agent.

[0241] Accordingly, in some embodiments, the method comprises: (a) obtaining a sample from the subject; (b) determining if the subject is susceptible to treatment with an agent capable of inhibiting or reversing EMT or a chemotherapeutic agent using a predictive method defined in accordance with the above described first and second aspects of this facet of the disclosure; and, (c) administering to the subject a therapeutically effective amount of an agent capable of inhibiting or reversing EMT or a chemotherapeutic agent.

[0242] In some embodiments the method comprises administering a therapeutically effective amount of an agent capable of inhibiting or reversing EMT or chemotherapeutic agent to a subject identified as susceptible to said treatment using a predictive method defined in accordance with the above described first and second aspects of this facet of the disclosure.

[0243] In other embodiments the method comprises: (a) administering to a subject a therapeutically effective amount of an agent capable of inhibiting or reversing EMT or a chemotherapeutic agent; and, (b) determining if the subject is susceptible to said treatment using a predictive method defined in accordance with the above described second aspect of this facet of the disclosure. In some embodiments the method further comprises: (c) administering to the subject one or more further therapeutically effective amounts of an agent capable of inhibiting or reversing EMT or a chemotherapeutic agent provided that the subject is identified as susceptible to said treatment.

[0244] A ninth aspect of this facet of the present disclosure relates to an agent capable of inhibiting or reversing EMT or chemotherapeutic agent for use in a method of treating a subject having, suspected of having, or diagnosed with acute myelocytic leukemia (AML). In some embodiments the method of treatment is a method as defined above.

[0245] A tenth aspect of this facet of the present disclosure relates to use of an agent capable of inhibiting or reversing EMT or chemotherapeutic agent for use in a method of manufacture of a medicament for use in a method of treating a subject having, suspected of having, or diagnosed with acute myelocytic leukemia (AML). In some embodiments the method of treatment is a method as defined above.

[0246] In some embodiments of these methods, agents for use, or uses, the agent capable of inhibiting or reversing EMT or chemotherapeutic agent comprises an Axl inhibitor, Akt3 inhibitor, Slfn11 inhibitor, or PHGDH inhibitor. In some preferred embodiments the agent capable of inhibiting or reversing EMT or chemotherapeutic agent is an Axl inhibitor, for example BGB324/R428/bemcentinib, cabozantinib, TP-0903, foretinib, merestinib, bosutinib, gilteritinib, crizotinib, amuvatinib, sunitinib, sitravatinib, LDC1267, or UNC2025. Other Axl inhibitors include the anti-Axl antibodies described in WO2015/193428, WO2015/193430, WO2016/097370, and WO2016/166296. In some preferred embodiments the Axl inhibitor is an anti-Axl antibody described in WO2015/193428, WO2015/193430, WO2016/097370, or WO2016/166296. In some particularly preferred embodiments the Axl inhibitor is BGB324/R428/bemcentinib.

[0247] In some other preferred embodiments, the treatment comprises an Akt3 inhibitor. In some embodiments the Akt3 inhibitor is an Akt3 inhibitor disclosed in WO2016/102672.

[0248] In some embodiments of these methods, agents for use, or uses, the treatment is administered as a single agent. In other embodiments, the treatment is administered in combination with a further cancer treatment. Suitable further cancer treatments are outlined in detail above. In some embodiments the further cancer treatment is a pyrimidine analogue, for example azacitidine, capecitabine, cytarabine, edatrexate, floxuridine, fluorouracil, gemcitabine, or troxacitabine, or a cytidine analogue, for example decitabine. In some particularly preferred embodiments the further cancer treatment is cytarabine. In other particularly preferred embodiments the further cancer treatment is decitabine.

[0249] Statements of Disclosure

[0250] The following numbered statements relate to aspects of this facet of the present disclosure, and form part of the description:
[0251] 101. A method of predicting a cancer-related outcome in a subject, the method comprising assessing the activity, expression, or amount of one or more biomarker in the subject, or in a sample derived from the subject;
   [0252] wherein the one or more biomarker is selected from the group consisting of: Axl, FGF-21, RAGE, CEA, FSH, MMP-10, Omentin, CA-19-9, LH, Haptoglobin, NAP-2, IgE, and/or CD40-L; and
   [0253] wherein the subject has, is suspected of having, or has been diagnosed with acute myelocytic leukemia (AML).
[0254] 102. A method according to statement 101, wherein the method comprises:
   [0255] assessing the activity, expression, or amount of one or more biomarker in the subject, or in a sample derived from the subject, to obtain a sample profile of the one or more biomarker; and
   [0256] making a prediction based on the sample profile of the one or more biomarker.
[0257] 103. A method according to statement 102, wherein the prediction is made by comparing the sample profile to a control profile.
[0258] 104. A method according to statement 103, wherein the sample profile is obtained before the subject is contacted with or administered an agent capable of inhibiting or reversing EMT or a chemotherapeutic agent.
[0259] 105. A method according to statement 104, wherein the control profile is:
   [0260] (i) obtained from a population of control subjects having AML; or
   [0261] (ii) obtained from a control subject or population of control subjects having AML and previously found to lack susceptibility to treatment with an agent capable of inhibiting or reversing EMT or a chemotherapeutic agent (that is, non-responder subjects);
   [0262] (iii) a predetermined profile of biomarker expression, activity, or amount values, for example a profile of “average, median, or mean” values or “standard ranges” of values, obtained from a control subject or population of control subjects having AML and previously found to lack susceptibility to treatment with an agent capable of inhibiting or reversing EMT or a chemotherapeutic agent (that is, non-responder subjects);
   [0263] (iv) obtained from a control sample having a known “average, median, or mean” value of biomarkers indicative of a control subject or population of control subjects having AML and previously found to lack susceptibility to treatment with an agent capable of inhibiting or reversing EMT or a chemotherapeutic agent (that is, non-responder subjects);
   [0264] (v) a predetermined profile of biomarker expression, activity, or amount “threshold” values obtained from a control subject or population of control subjects having AML and previously found to be susceptible to treatment with an agent capable of inhibiting or reversing EMT or a chemotherapeutic agent (that is, responder subjects); or
   [0265] (vi) obtained from a control sample having a known “threshold” value of biomarkers indicative of a control subject or population of control subjects having AML and previously found to be susceptible to treatment with an agent capable of inhibiting or reversing EMT or a chemotherapeutic agent (that is, responder subjects).
[0266] 106. A method according to statement 105, wherein a higher activity, expression, or amount of one or more biomarker in the sample profile as compared with the control profile is indicative of susceptibility to treatment with an agent capable of inhibiting or reversing EMT or a chemotherapeutic agent.
[0267] 107. A method according to statement 105, wherein a lower activity, expression, or amount of one or more biomarker in the sample profile as compared with the control profile is indicative of susceptibility to treatment with an agent capable of inhibiting or reversing EMT or a chemotherapeutic agent.
[0268] 108. A method according to any one of statements 105-107, wherein the one or more biomarker includes at least one of: Haptoglobin, NAP-2, IgE, and/or CD40-L,
   [0269] and wherein a higher activity, expression, or amount of one or more of said biomarkers in the sample profile as compared with the control profile is indicative of susceptibility to treatment with an agent capable of inhibiting or reversing EMT or a chemotherapeutic agent.
[0270] 109. A method according to any one of statements 105-108, wherein the one or more biomarker includes at least one of: Axl, FGF-21, RAGE, CEA, FSH, MMP-10, Omentin, CA-19-9, and/or LH,
   [0271] and wherein a lower activity, expression, or amount of one or more of said biomarkers in the sample profile as compared with the control profile is indicative of susceptibility to treatment with an agent capable of inhibiting or reversing EMT or a chemotherapeutic agent.
[0272] 110. A method according to any one of statements 105-109, wherein:
   [0273] a lower activity, expression, or amount of Axl; and/or
   [0274] a lower activity, expression, or amount of FGF-21; and/or
   [0275] a lower activity, expression, or amount of RAGE; and/or
   [0276] a lower activity, expression, or amount of CEA; and/or
   [0277] a lower activity, expression, or amount of FSH; and/or
   [0278] a lower activity, expression, or amount of MMP-10; and/or
   [0279] a lower activity, expression, or amount of Omentin; and/or
   [0280] a lower activity, expression, or amount of CA-19-9; and/or
   [0281] a lower activity, expression, or amount of LH; and/or
   [0282] a higher activity, expression, or amount of Haptoglobin; and/or
   [0283] a higher activity, expression, or amount of NAP-2; and/or
   [0284] a higher activity, expression, or amount of IgE; and/or
   [0285] a higher activity, expression, or amount of CD40-L;
   [0286] in the sample profile as compared with the control profile is indicative of susceptibility to treatment with an agent capable of inhibiting or reversing EMT or a chemotherapeutic agent.
[0287] 111. A method according to any one of statements 101-110, wherein the one or more biomarker comprises Axl,
   [0288] optionally wherein the one or more biomarker comprises Axl and at least 1, 2, 3, 4, 5, 6, 7, 8, 9, 10, or more further biomarkers selected from: FGF-21, RAGE, CEA, FSH, MMP-10, Omentin, CA-19-9, LH, Haptoglobin, NAP-2, IgE, and/or CD40-L.
[0289] 112. A method according to any one of statements 101-111, wherein:
   [0290] said Axl biomarker comprises an amino acid sequence having at least 70%, 80%, 90%, 95%, 99% or 100% sequence identity with the full-length of the amino acid sequence disclosed at UniProt accession no: P30530-1 or P30530-2 (entry version 196) or a fragment thereof;
   [0291] said Fibroblast Growth Factor 21 (FGF-21) biomarker comprises an amino acid sequence having at least 70%, 80%, 90%, 95%, 99% or 100% sequence identity with the full-length of the amino acid sequence disclosed at UniProt accession no: Q9NSA1 (entry version 145) or a fragment thereof;
   [0292] said Receptor for advanced glycosylation end products (RAGE) biomarker comprises an amino acid sequence having at least 70%, 80%, 90%, 95%, 99% or 100% sequence identity with the full-length of the amino acid sequence disclosed at UniProt accession no: Q15109-1, Q15109-2, Q15109-3, Q15109-4, Q15109-5, Q15109-6, Q15109-7, Q15109-8, Q15109-9, Q15109-10 (entry version 189) or a fragment thereof;
   [0293] said Carcinoembryonic Antigen (CEA) biomarker comprises an amino acid sequence having at least 70%, 80%, 90%, 95%, 99% or 100% sequence identity with the full-length of the amino acid sequence disclosed at UniProt accession no: P06731-1 or P06731-2 (entry version 179) or a fragment thereof;
   [0294] said Follicle-Stimulating Hormone (FSH) biomarker comprises an amino acid sequence having at least 70%, 80%, 90%, 95%, 99% or 100% sequence identity with the full-length of the amino acid sequence disclosed at UniProt accession no: P01225 (entry version 189) or a fragment thereof;
   [0295] said Matrix Metalloproteinase-10 (MMP-10) biomarker comprises an amino acid sequence having at least 70%, 80%, 90%, 95%, 99% or 100% sequence identity with the full-length of the amino acid sequence disclosed at UniProt accession no: P09238 (entry version 185) or a fragment thereof;
   [0296] said Omentin biomarker comprises an amino acid sequence having at least 70%, 80%, 90%, 95%, 99% or 100% sequence identity with the full-length of the amino acid sequence disclosed at UniProt accession no: Q8WWA0 (entry version 127) or a fragment thereof;
   [0297] said Cancer Antigen 19-9 (CA-19-9) biomarker comprises an amino acid sequence having at least 70%, 80%, 90%, 95%, 99% or 100% sequence identity with the full-length of the amino acid sequence disclosed at UniProt accession no: Q9BXJ9-1 or Q9BXJ9-2 (entry version 160) or a fragment thereof;
   [0298] said Luteinizing Hormone (LH) biomarker comprises an amino acid sequence having at least 70%, 80%, 90%, 95%, 99% or 100% sequence identity with the full-length of the amino acid sequence disclosed at UniProt accession no: P01229 (entry version 179) or a fragment thereof;
   [0299] said Haptoglobin (HP) biomarker comprises an amino acid sequence having at least 70%, 80%, 90%, 95%, 99% or 100% sequence identity with the full-length of the amino acid sequence disclosed at UniProt accession no: P00738-1 or P00738-2 (entry version 200) or a fragment thereof;
   [0300] said Neutrophil Activating Peptide 2 (NAP-2) biomarker comprises an amino acid sequence having at least 70%, 80%, 90%, 95%, 99% or 100% sequence identity with the full-length of the amino acid sequence disclosed at UniProt accession no: P02775 (entry version 191) or a fragment thereof;
   [0301] said Immunoglobulin E (IgE) biomarker comprises an amino acid sequence having at least 70%, 80%, 90%, 95%, 99% or 100% sequence identity with the full-length of the amino acid sequence disclosed at UniProt accession no: P01854 (entry version 162) or a fragment thereof; and/or
   [0302] said CD40 Ligand (CD40-L) biomarker comprises an amino acid sequence having at least 70%, 80%, 90%, 95%, 99% or 100% sequence identity with the full-length of the amino acid sequence disclosed at UniProt accession no: P29965 (entry version 199) or a fragment thereof;
   [0303] or a nucleic acid (either DNA or RNA) having at least 70%, 80%, 90%, 95%, 99% or 100% sequence identity with the full-length nucleic acid sequence encoding said amino acid sequences.
[0304] 113. A method according to any one of statement 101-112, wherein the method comprises determining the amount of at least 2, 3, 4, 5, 6, 7, 8, 9, 10, 11, 12, 13, 14, 15, 20 of said biomarkers in the subject, or sample derived from the subject.
[0305] 114. A method according to any one of statements 104-113, wherein assessing the activity, expression, or amount of one or more biomarker in the subject, or in a sample derived from the subject, comprises:
   [0306] contacting a sample, or an extract from the sample, with at least 1, 2, 3, 4, 5, 6, 7, 8, 9, 10 or more reagents for detecting the activity, expression, or amount of one or more biomarkers, each of which is selective for a particular biomarker; and
   [0307] detecting and/or quantifying said reagents for detecting.
[0308] 115. A method according to statement 114, wherein assessing the expression or amount of one or more biomarker in the subject, or in a sample derived from the subject, comprises:
   [0309] contacting a sample, or an extract from the sample, with at least 1, 2, 3, 4, 5, 6, 7, 8, 9, 10 or more specific binding members, each of which selectively binds to a respective biomarker protein or mRNA; and
   [0310] detecting and/or quantifying formation of complex formed by said specific binding member and said biomarker protein or mRNA.
[0311] 116. A method according to statement 115 wherein the specific binding member comprises an antibody molecule or binding fragment thereof.
[0312] 117. A method according to statement 115 or 116, wherein detecting formation of a complex formed by the specific binding member and the biomarker protein or mRNA is carried out by use of a technique selected from: Western blot; enzyme-linked immunosorbent assay (ELISA); radioimmunoassay (RIA); competitive enzyme immunoassay; double antibody sandwich ELISA (DAS-ELISA); liquid immunoarray technology; immunocytochemistry; immunohistochemistry; antibody microarray detection; precipitation of colloidal gold; affinity chromatography; ligand binding assay; and lectin binding assay.
[0313] 118. A method according to any one of statements 115-117 wherein the expression or amount of the one or more biomarker is determined as the absolute amount of the respective biomarker protein or mRNA in the sample.
[0314] 119. A method according to any one of statements 115-117 wherein the expression or amount of the one or more biomarker is determined as a relative amount of the respective biomarker protein or mRNA in the sample,
   [0315] optionally wherein the relative amount is determined relative to a reference protein or mRNA in the sample, the expression of which is not altered by AML.
[0316] 120. A method according to any one of statements 101-119, wherein the cancer-related outcome is susceptibility to treatment with an agent capable of inhibiting or reversing EMT or a chemotherapeutic agent.
[0317] 121. A method according to statement 120, wherein the agent capable of inhibiting or reversing EMT or chemotherapeutic agent is an Axl inhibitor, Akt3 inhibitor, Slfn11 inhibitor, or PHGDH inhibitor.
[0318] 122. A method according to statement 121, wherein the agent capable of inhibiting or reversing EMT or chemotherapeutic agent is an Axl inhibitor.
[0319] 123. A method according to statement 122, wherein the Axl inhibitor is BGB324/R428/bemcentinib, cabozantinib, TP-0903, foretinib, merestinib, bosutinib, gilteritinib, crizotinib, amuvatinib, sunitinib, sitravatinib, LDC1267, UNC2025, or an anti-Axl antibody described in WO2015/193428, WO2015/193430, WO2016/097370, or WO2016/166296.
[0320] 124. A method according to statement 123, wherein the Axl inhibitor is BGB324/R428/bemcentinib.
[0321] 125. A method according to statement 123, wherein the Axl inhibitor is an anti-Axl antibody described in WO2015/193428, WO2015/193430, WO2016/097370, or WO2016/166296.
[0322] 126. A method according to statement 121, wherein the agent capable of inhibiting or reversing EMT or chemotherapeutic agent is an Akt3 inhibitor.
[0323] 127. A method according to statement 126, wherein the Akt3 inhibitor is an Akt3 inhibitor disclosed in WO2016/102672.
[0324] 128. A method according to any one of statements 120-127, wherein the agent capable of inhibiting or reversing EMT is administered as a single agent.
[0325] 129. A method according to any one of statements 120-127, wherein the agent capable of inhibiting or reversing EMT is administered in combination with a further cancer treatment.
[0326] 130. A method according to statement 129, wherein the further cancer treatment is selected from:
   [0327] (i) alkylating agents, including alkyl sulfonates such as busulfan;
   [0328] (ii) nitrogen mustards such as chlorambucil, cyclophosphamide, estramustine, ifosfamide, mechlorethamine, melphalan, and uramustine;
   [0329] (iii) ethyleneimine derivatives such as thiotepa;
   [0330] (iv) nitrosoureas such as carmustine, lomustine, and streptozocin;
   [0331] (v) triazenes such as dacarbazine, procarbazine, and temozolamide;
   [0332] (vi) platinum compounds such as cisplatin, carboplatin, oxaliplatin, satraplatin, and picoplatin onnaplatin, tetraplatin, sprioplatin, iproplatin, chloro(diethylenediamino)-platinum (II) chloride, dichloro(ethylenediamino)-platinum (II), diamino(2-ethylmalonato)platinum (II), (1,2-diaminocyclohexane)malonatoplatinum (II), (4-carboxyphthalo)-(1,2-diaminocyclohexane)platinum (II), (1,2-diaminocyclohexane)-(isocitrato)platinum (II), and (1,2-diaminocyclohexane)-cis-(pyruvato)platinum (II);
   [0333] (vii) antimetabolites, including antifolates such as methotrexate, permetrexed, raltitrexed, and trimetrexate;
   [0334] (viii) pyrimidine analogues such as azacitidine, capecitabine, cytarabine, edatrexate, floxuridine, fluorouracil, gemcitabine, and troxacitabine;
   [0335] (ix) purine analogues such as cladribine, chlorodeoxyadenosine, clofarabine, fludarabine, mercaptopurine, pentostatin, and thioguanine;
   [0336] (x) natural products, including antitumor antibiotics such as bleomycin, dactinomycin, mithramycin, mitomycin, mitoxantrone, porfiromycin;
   [0337] (xi) anthracyclines such as daunorubicin, doxorubicin, epirubicin, idarubicin, and valrubicin;
   [0338] (xii) mitotic inhibitors such as the vinca alkaloids vinblastine, vinvesir, vincristine, vindesine, and vinorelbine;
   [0339] (xiii) enzymes such as L-asparaginase and PEG-L-asparaginase;
   [0340] (xiv) microtubule polymer stabilizers such as the taxanes paclitaxel and docetaxel;
   [0341] (xv) topoisomerase I inhibitors such as the camptothecins irinotecan and topotecan;
   [0342] (xvi) topoisomerase II inhibitors such as podophyllotoxin, amsacrine, etoposide, teniposide, losoxantrone and actinomycin;
   [0343] (xvii) hormones and hormone antagonists, including
      [0344] androgens such as fluoxymesterone and testolactone;
      [0345] antiandrogens such as bicalutamide, cyproterone, flutamide, and nilutamide;
      [0346] corticosteroids such as dexamethasone and prednisone;
      [0347] aromatase inhibitors such as aminoglutethimide, anastrozole, exemestane, formestane, and letrozole;
      [0348] estrogens such as diethylstilbestrol;
      [0349] antiestrogens such as fulvestrant, raloxifene, tamoxifen, and toremifine;
      [0350] luteinising hormone-releasing hormone (LHRH) agonists and antagonists such as abarelix, buserelin, goserelin, leuprolide, histrelin, desorelin, nafarelin acetate and triptorelin;
      [0351] progestins such as medroxyprogesterone acetate and megestrol acetate; and
      [0352] thyroid hormones such as levothyroxine and liothyronine;
   [0353] (xviii) PKB pathway inhibitors, including perifosine, enzastaurin hydrochloride, and triciribine;
   [0354] (xix) P13K inhibitors such as semaphore and SF1126, and MTOR inhibitors such as rapamycin and analogues;
   [0355] (xx) CDK inhibitors, including seliciclib, alvocidib, and 7-hydroxystaurosporine;
   [0356] (xxi) COX-2 inhibitors, including celecoxib;
   [0357] (xxii) HDAC inhibitiors, including trichostatin A, suberoylanilide hydroxamic acid, and chlamydocin;
   [0358] (xxiii) DNA methylase inhibitors, including temozolomide, and miscellaneous agents, including altretamine, arsenic trioxide, thalidomide, lenalidomide, gallium nitrate, levamisole, mitotane, hydroxyurea, octreotide, procarbazine, suramin, photodynamic compounds such as methoxsalen and sodium porfimer;
   [0359] (xxiv) proteasome inhibitors such as bortezomib;
   [0360] (xxv) molecular targeted therapy agents including: functional therapeutic agents, including gene therapy agents and antisense therapy agents;
   [0361] (xxvi) tyrosine kinase inhibitors such as erlotinib hydrochloride, gefitinib, imatinib mesylate, and semaxanib;
   [0362] (xxvii) Raf inhibitors such as sorafenib, and gene expression modulators such as the retinoids and rexinoids, for example adapalene, bexarotene, trans-retinoic acid, 9-cis-retinoic acid, and N-(4-hydroxyphenyl)retinamide;
   [0363] (xxviii) phenotype-directed therapy agents, including monoclonal antibodies such as pembrolizumab, alemtuzumab, bevacizumab, cetuximab, ibritumomab tiuxetan, rituximab, and trastuzumab, immunotoxins such as gemtuzumab ozogamicin, radioimmunoconjugates such as I-tositumobab;
   [0364] (xxix) cancer vaccines;
   [0365] (xxx) biologic therapy agents including: interferons such as interferon-[alpha]2a and interferon-[alpha]2b, and interleukins such as aldesleukin, denileukin diftitox, and oprelvekin; (xxxi) anticancer therapies involving the use of protective or adjunctive agents, including: cytoprotective agents such as amifostine, and dexrazoxane, phosphonates such as pamidronate and zoledronic acid, and stimulating factors such as epoetin, darbeopetin, filgrastim, PEG-filgrastim, and sargramostim;
   [0366] (xxxii) Axl inhibitors such as 1-(6,7-dihydro-5H-benzo[6,7]cyclohepta[1,2-c]pyridazin-3-yl)-N3-((7-(S)-pyrrolidin-1-yl)-6,7,8,9-tetrahydro-5H-benzo[7]annulene-2-yl)-1H-1,2,4-triazole-3,5-diamine; and/or
   [0367] (xxxiii) further combination chemotherapeutic regimens, such as combinations of carboplatin/paclitaxel, capecitabine/docetaxel, fluorauracil/levamisole, fluorauracil/leucovorin, methotrexate/leucovorin, and trastuzumab/paclitaxel, alone or in further combination with carboplatin.
[0368] 131. A method according to statement 129, wherein the further cancer treatment is a pyrimidine analogue, for example azacitidine, capecitabine, cytarabine, edatrexate, floxuridine, fluorouracil, gemcitabine, or troxacitabine, or a cytidine analogue, for example decitabine.
[0369] 132. A method according to statement 131, wherein the further cancer treatment is cytarabine.
[0370] 133. A method according to statement 131, wherein the further cancer treatment is decitabine.
[0371] 134. A method according to any one of statements 101-133, wherein the subject is mammalian.
[0372] 135. A method according to statement 134, wherein the subject is human.
[0373] 136. A method according to any one of statements 101-135, wherein the predictive method is performed before the subject receives a treatment or course of treatment for AML.
[0374] 137. A method according to any one of statement 101-136, wherein the predictive method is performed during or after a treatment or course of treatment for AML.
[0375] 138. A method according to any one of statements 101-135 or 137, wherein the subject has previously been treated with an agent capable of inhibiting or reversing EMT or a chemotherapeutic agent.
[0376] 139. A method according to statement 138, wherein the subject has previously been treated with an agent selected from: a PHGDH inhibitor, a Slfn11 inhibitor, an Axl inhibitor, or an Akt3 inhibitor.
[0377] 140. A method according to any one of statements 138-139, wherein the subject has previously been treated with an agent that is different to the agent capable of inhibiting or reversing EMT or chemotherapeutic agent for which the subject's susceptibility is being predicted.
[0378] 141. A method according to any one of statements 101-136, wherein the subject has not previously been treated with an agent capable of inhibiting or reversing EMT or a chemotherapeutic agent.
[0379] 142. A method according to statement 141, wherein the subject has not previously been treated with an Axl inhibitor.
[0380] 143. A method according to statement 141, wherein the subject has not previously been treated with an Akt3 inhibitor.
[0381] 144. A method according to any one of statements 101-143, wherein the sample is selected from: blood, serum, plasma, tissue biopsy, culture supernatant, or urine.
[0382] 145. A method according to statement 144, wherein the sample is a blood, serum, or plasma sample.
[0383] 146. A method according to statement 145, wherein the sample is a serum sample.
[0384] 147. A method according to any one of statements 104-146, wherein the method further comprises a subsequent step of assessing the activity, expression, or amount of one or more biomarker in the subject, in which a sample profile is obtained after contacting the subject with an agent capable of inhibiting or reversing EMT or a chemotherapeutic agent.
[0385] 148. A method according to statement 103, wherein the sample profile is obtained after contacting the subject with an agent capable of inhibiting or reversing EMT or a chemotherapeutic agent.
[0386] 149. A method according to statement 147 or 148, wherein the control profile is obtained from the same subject prior to contacting said subject with the agent capable of inhibiting or reversing EMT or a chemotherapeutic agent.
[0387] 150. A method according to statement 149, wherein an increase in the activity, expression, or amount of one or more biomarker in the sample profile as compared with the control profile is indicative of higher susceptibility to treatment with an agent capable of inhibiting or reversing EMT or a chemotherapeutic agent.
[0388] 151. A method according to statement 149, wherein a decrease in the activity, expression, or amount of one or more biomarker in the sample profile as compared with the control profile is indicative of higher susceptibility to treatment with an agent capable of inhibiting or reversing EMT or a chemotherapeutic agent.
[0389] 152. A method according to statement 149, wherein an increase in the activity, expression, or amount of one or more biomarker in the sample profile as compared with the control profile is indicative of lower susceptibility to treatment with an agent capable of inhibiting or reversing EMT or a chemotherapeutic agent.
[0390] 153. A method according to statement 149, wherein a decrease in the activity, expression, or amount of one or more biomarker in the sample profile as compared with the control profile is indicative of lower susceptibility to treatment with an agent capable of inhibiting or reversing EMT or a chemotherapeutic agent.
[0391] 154. A method according to statement 150, wherein the one or more biomarker includes at least Axl.
[0392] 155. A method according to any one of statements 147-154, wherein assessing the activity, expression, or amount of one or more biomarker in the subject, or in a sample derived from the subject, comprises:
   [0393] contacting a sample, or an extract from the sample, with at least 1, 2, 3, 4, 5, 6, 7, 8, 9, 10 or more reagents for detecting the activity, expression, or amount of one or more biomarkers, each of which is selective for a particular biomarker; and
   [0394] detecting and/or quantifying said reagents for detecting.
[0395] 156. A method according to statement 155, wherein assessing the expression or amount of one or more biomarker in the subject, or in a sample derived from the subject, comprises:
   [0396] contacting a sample, or an extract from the sample, with at least 1, 2, 3, 4, 5, 6, 7, 8, 9, 10 or more specific binding members, each of which selectively binds to a respective biomarker protein or mRNA; and
   [0397] detecting and/or quantifying formation of a complex formed by said specific binding member and said biomarker protein or mRNA.
[0398] 157. A method according to statement 156, wherein the specific binding member comprises an antibody molecule or binding fragment thereof.
[0399] 158. A method according to statement 156 or 157, wherein detecting formation of a complex formed by the specific binding member and the biomarker protein or mRNA is carried out by use of a technique selected from: Western blot; enzyme-linked immunosorbent assay (ELISA); radioimmunoassay (RIA); competitive enzyme immunoassay; double antibody sandwich ELISA (DAS-ELISA); liquid immunoarray technology; immunocytochemistry; immunohistochemistry; antibody microarray detection; precipitation of colloidal gold; affinity chromatography; ligand binding assay; and lectin binding assay.
[0400] 159. A method according to any one of statements 156-158 wherein the expression or amount of the one or more biomarker is determined as the absolute amount of the respective biomarker protein or mRNA in the sample.
[0401] 160. A method according to any one of statements 156-158 wherein the expression or amount of the one or more biomarker is determined as a relative amount of the respective biomarker protein or mRNA in the sample,
   [0402] optionally wherein the relative amount is determined relative to a reference protein or mRNA in the sample, the expression of which is not altered by AML.
[0403] 161. A method according to any one of statements 148-160, wherein the agent capable of inhibiting or reversing EMT or chemotherapeutic agent is an Axl inhibitor, Akt3 inhibitor, Slfn11 inhibitor, or PHGDH inhibitor.
[0404] 162. A method according to statement 161, wherein the agent capable of inhibiting or reversing EMT or chemotherapeutic agent is an Axl inhibitor.
[0405] 163. A method according to statement 162, wherein the Axl inhibitor is BGB324/R428/bemcentinib, cabozantinib, TP-0903, foretinib, merestinib, bosutinib, gilteritinib, crizotinib, amuvatinib, sunitinib, sitravatinib, LDC1267, UNC2025, or an anti-Axl antibody described in WO2015/193428, WO2015/193430, WO2016/097370, or WO2016/166296.
[0406] 164. A method according to statement 163, wherein the Axl inhibitor is BGB324/R428/bemcentinib.
[0407] 165. A method according to statement 163, wherein the Axl inhibitor is an anti-Axl antibody described in WO2015/193428, WO2015/193430, WO2016/097370, or WO2016/166296.
[0408] 166. A method according to statement 161, wherein the agent capable of inhibiting or reversing EMT or chemotherapeutic agent is an Akt3 inhibitor.
[0409] 167. A method according to statement 166, wherein the Akt3 inhibitor is an Akt3 inhibitor disclosed in WO2016/102672.
[0410] 168. A method according to any one of statements 161-167, wherein the agent capable of inhibiting or reversing EMT is administered as a single agent.
[0411] 169. A method according to any one of statements 161-167, wherein the agent capable of inhibiting or reversing EMT is administered in combination with a further cancer treatment.
[0412] 170. A method according to statement 169, wherein the further cancer treatment is selected from the further cancer treatments listed in statement 130.
[0413] 171. A method according to statement 169, wherein the further cancer treatment is a pyrimidine analogue, for example azacitidine, capecitabine, cytarabine, edatrexate, floxuridine, fluorouracil, gemcitabine, or troxacitabine, or a cytidine analogue, for example decitabine.
[0414] 172. A method according to statement 171, wherein the further cancer treatment is cytarabine.
[0415] 173. A method according to statement 171, wherein the further cancer treatment is decitabine.
[0416] 174. A method according to any one of statements 148-173, wherein the subject is mammalian.
[0417] 175. A method according to statement 174, wherein the subject is human.
[0418] 176. A method according to any one of statements 148-175, wherein the subject was selected for treatment with the agent capable of inhibiting or reversing EMT or a chemotherapeutic agent, using a predictive method according to any one of statements 101-147.
[0419] 177. A method according to any one of statements 148-176, wherein the sample is selected from: blood, serum, plasma, tissue biopsy, culture supernatant, or urine.
[0420] 178. A method according to statement 177, wherein the sample is a blood, serum, or plasma sample.
[0421] 179. A method according to statement 178, wherein the sample is a serum sample.
[0422] 180. A method according to any one of statements 1-179, wherein the method is performed in vitro or ex vivo.
[0423] 201. A method of selecting subjects having, suspected of having, or diagnosed with acute myelocytic leukemia (AML) for treatment with an agent capable of inhibiting or reversing EMT or a chemotherapeutic agent, the method comprising:
   [0424] identifying subjects susceptible to treatment with an agent capable of inhibiting or reversing EMT or a chemotherapeutic agent using a method according to any one of statements 101-180; and
   [0425] selecting thus identified subjects for treatment.
[0426] 202. A method of selecting subjects having, suspected of having, or diagnosed with acute myelocytic leukemia (AML) for continued treatment with an agent capable of inhibiting or reversing EMT or a chemotherapeutic agent, the method comprising:
   [0427] identifying subjects susceptible to treatment with an agent capable of inhibiting or reversing EMT or a chemotherapeutic agent using a method according to any one of statements 148-180; and
   [0428] selecting thus identified subjects for treatment.
[0429] 203. A method according to any one of statements 201-202, wherein treatment comprises administering to the subject a therapeutically effective amount of an agent capable of inhibiting or reversing EMT or a chemotherapeutic agent.
[0430] 204. A method according to statement 203, wherein the treatment comprises an Axl inhibitor, Akt3 inhibitor, Slfn11 inhibitor, or PHGDH inhibitor.
[0431] 205. A method according to statement 204, wherein the treatment comprises an Axl inhibitor.
[0432] 206. A method according to statement 205, wherein the Axl inhibitor is BGB324/R428/bemcentinib, cabozantinib, TP-0903, foretinib, merestinib, bosutinib, gilteritinib, crizotinib, amuvatinib, sunitinib, sitravatinib, LDC1267, UNC2025, or an anti-Axl antibody described in WO2015/193428, WO2015/193430, WO2016/097370, or WO2016/166296.
[0433] 207. A method according to statement 206, wherein the Axl inhibitor is BGB324/R428/bemcentinib.
[0434] 208. A method according to statement 206, wherein the Axl inhibitor is an anti-Axl antibody described in WO2015/193428, WO2015/193430, WO2016/097370, or WO2016/166296.
[0435] 209. A method according to statement 204, wherein the treatment comprises an Akt3 inhibitor.
[0436] 210. A method according to statement 209, wherein the Akt3 inhibitor is an Akt3 inhibitor disclosed in WO2016/102672.
[0437] 211. A method according to any one of statements 203-210, wherein the treatment is administered as a single agent.
[0438] 212. A method according to any one of statements 203-211, wherein the treatment is administered in combination with a further cancer treatment.
[0439] 213. A method according to statement 212, wherein the further cancer treatment is selected from the further cancer treatments listed in statement 130.
[0440] 214. A method according to statement 212, wherein the further cancer treatment is a pyrimidine analogue, for example azacitidine, capecitabine, cytarabine, edatrexate, floxuridine, fluorouracil, gemcitabine, or troxacitabine, or a cytidine analogue, for example decitabine.
[0441] 215. A method according to statement 214, wherein the further cancer treatment is cytarabine.
[0442] 216. A method according to statement 214, wherein the further cancer treatment is decitabine.
[0443] 301. A diagnostic kit comprising 1, 2, 3, 4, 5, 6, 7, 8, 9, 10 or more reagents for detecting the activity, expression, or amount of one or more biomarkers, each of which is selective for a particular biomarker selected from the group consisting of: Axl, FGF-21, RAGE, CEA, FSH, MMP-10, Omentin, CA-19-9, LH, Haptoglobin, NAP-2, IgE, and/or CD40-L.
[0444] 302. A test device comprising 1, 2, 3, 4, 5, 6, 7, 8, 9, 10 or more reagents for detecting the activity, expression, or amount of one or more biomarkers, each of which is selective for a particular biomarker selected from the group consisting of: Axl, FGF-21, RAGE, CEA, FSH, MMP-10, Omentin, CA-19-9, LH, Haptoglobin, NAP-2, IgE, and/or CD40-L.
[0445] 303. A diagnostic kit or test device according to any one of statements 301 or 302, comprising:
   [0446] 1, 2, 3, 4, 5, 6, 7, 8, 9, 10 or more specific binding members, each of which selectively binds to a biomarker selected from the group consisting of: Axl, FGF-21, RAGE, CEA, FSH, MMP-10, Omentin, CA-19-9, LH, Haptoglobin, NAP-2, IgE, and/or CD40-L; and
   [0447] one or more reagents for detecting said one or more specific binding members or one or more reagents for detecting and/or quantifying formation of a complex formed by said specific binding member and said biomarker.
[0448] 304. A diagnostic kit or test device according to statement 303, wherein the specific binding member comprises an antibody molecule or binding fragment thereof.
[0449] 305. A diagnostic kit or test device according to statement 303 or 304, wherein detecting formation of a complex formed by the specific binding member and the biomarker is carried out by use of a technique selected from: Western blot; enzyme-linked immunosorbent assay (ELISA); radioimmunoassay (RIA); competitive enzyme immunoassay; double antibody sandwich ELISA (DAS-ELISA); liquid immunoarray technology; immunocytochemistry; immunohistochemistry; antibody microarray detection; precipitation of colloidal gold; affinity chromatography; ligand binding assay; and lectin binding assay.
[0450] 306. A diagnostic kit or test device according to any one of statements 301-305, wherein the kit or test device comprises no more than 15, 20, 25, 30, 40, or 50 reagents for detecting.
[0451] 307. A diagnostic kit or test device according to any one of statements 301-306 for use in a method of predicting a cancer-related outcome in a subject.
[0452] 308. A diagnostic kit for use, or test device for use, according to statement 307, wherein the cancer-related outcome is susceptibility to treatment with an agent capable of inhibiting or reversing EMT or a chemotherapeutic agent.
[0453] 309. A diagnostic kit for use, or test device for use, according to statement 308, wherein the agent capable of inhibiting or reversing EMT or chemotherapeutic agent is an Axl inhibitor, Akt3 inhibitor, Slfn11 inhibitor, or PHGDH inhibitor.
[0454] 310. A diagnostic kit for use, or test device for use, according to statement 308, wherein the agent capable of inhibiting or reversing EMT or chemotherapeutic agent is an Axl inhibitor.
[0455] 311. A diagnostic kit for use, or test device for use, according to statement 310, wherein the Axl inhibitor is BGB324/R428/bemcentinib, cabozantinib, TP-0903, foretinib, merestinib, bosutinib, gilteritinib, crizotinib, amuvatinib, sunitinib, sitravatinib, LDC1267, UNC2025, or an anti-Axl antibody described in WO2015/193428, WO2015/193430, WO2016/097370, or WO2016/166296.
[0456] 312. A diagnostic kit for use, or test device for use, according to statement 311, wherein the Axl inhibitor is BGB324/R428/bemcentinib.
[0457] 313. A diagnostic kit for use, or test device for use, according to statement 311, wherein the Axl inhibitor is an anti-Axl antibody described in WO2015/193428, WO2015/193430, WO2016/097370, or WO2016/166296.
[0458] 314. A diagnostic kit for use, or test device for use, according to statement 308, wherein the agent capable of inhibiting or reversing EMT or chemotherapeutic agent is an Akt3 inhibitor.
[0459] 315. A diagnostic kit for use, or test device for use, according to any one of statements 307-310, wherein the subject has, is suspected of having, or has been diagnosed with acute myelocytic leukemia (AML).
[0460] 316. A diagnostic kit for use, or test device for use, according to any one of statements 307-315, wherein the method is a method according to any one of statements 101-180.
[0461] 317. Use of a reagent for detecting the activity, expression, or amount of a biomarker selected from the group consisting of: Axl, FGF-21, RAGE, CEA, FSH, MMP-10, Omentin, CA-19-9, LH, Haptoglobin, NAP-2, IgE, and/or CD40-L, in a method of predicting a cancer-related outcome in a subject.
[0462] 318. Use of 1, 2, 3, 4, 5, 6, 7, 8, 9, 10 or more reagents for detecting the activity, expression, or amount a biomarker, each of which is selective for a particular biomarker selected from the group consisting of: Axl, FGF-21, RAGE, CEA, FSH, MMP-10, Omentin, CA-19-9, LH, Haptoglobin, NAP-2, IgE, and/or CD40-L, in a method of manufacture of a diagnostic kit or test device for use in a method of predicting a cancer-related outcome in a subject.
[0463] 319. A use according to statement 317 or 318, wherein the reagent for detecting comprises a specific binding member selective for a particular biomarker.
[0464] 320. A use according to statement 317 or 318, wherein the method of predicting a cancer-related outcome in a subject is a method according to any one of statements 101-180.
[0465] 401. Use of one or more of: Axl, FGF-21, RAGE, CEA, FSH, MMP-10, Omentin, CA-19-9, LH, Haptoglobin, NAP-2, IgE, and/or CD40-L, as a biomarker for determining if a subject is susceptible to treatment with an agent capable of inhibiting or reversing EMT or a chemotherapeutic agent.
[0466] 402. A use according to statement 401, wherein:
   [0467] (i) a higher activity, expression, or amount of one or more of said biomarkers in the subject, or sample derived from the subject, compared with a control profile for the respective biomarker is indicative of susceptibility to treatment with an agent capable of inhibiting or reversing EMT or a chemotherapeutic agent; or
   [0468] (ii) a lower activity, expression, or amount of one or more of said biomarkers in the subject, or sample derived from the subject, compared with a control profile for the respective biomarker is indicative of susceptibility to treatment with an agent capable of inhibiting or reversing EMT or a chemotherapeutic agent.
[0469] 403. A use according to statement 401, wherein:
   [0470] (i) an increase in the activity, expression, or amount of one or more biomarker relative to a control profile for the respective biomarker after contacting the subject with a cancer therapeutic agent is indicative of increased susceptibility to treatment with an agent capable of inhibiting or reversing EMT or a chemotherapeutic agent; or
   [0471] (ii) a decrease in the activity, expression, or amount of one or more biomarker relative to a control profile for the respective biomarker after contacting the subject with a cancer therapeutic agent is indicative of increased susceptibility to treatment with an agent capable of inhibiting or reversing EMT or a chemotherapeutic agent.
[0472] 404. A use according to any one of statements 401-403, wherein the use is as a biomarker in a method according to any one of statements 101-180
[0473] 501. A method of treating a subject having, suspected of having, or diagnosed with acute myelocytic leukemia (AML), the method comprising:
   [0474] identifying a subject susceptible to treatment using a method according to any one of statements 101-180; and
   [0475] administering to the subject a therapeutically effective amount of an agent capable of inhibiting or reversing EMT or a chemotherapeutic agent.
[0476] 502. A method of treating a subject having, suspected of having, or diagnosed with acute myelocytic leukemia (AML), the method comprising:
   [0477] (a) obtaining a sample from the subject;
   [0478] (b) determining if the subject is susceptible to treatment with an agent capable of inhibiting or reversing EMT or a chemotherapeutic agent using a method according to any one of statements 101-180;
   [0479] (c) administering to the subject a therapeutically effective amount of an agent capable of inhibiting or reversing EMT or a chemotherapeutic agent.
[0480] 503. A method of treating a subject having, suspected of having, or diagnosed with acute myelocytic leukemia (AML), the method comprising administering a therapeutically effective amount of an agent capable of inhibiting or reversing EMT or chemotherapeutic agent to a subject identified as susceptible to said treatment using a method according to any one of statements 101-180.
[0481] 504. A method of treating a subject having, suspected of having, or diagnosed with acute myelocytic leukemia (AML), the method comprising:
   [0482] administering to the subject a therapeutically effective amount of an agent capable of inhibiting or reversing EMT or a chemotherapeutic agent; and
   [0483] determining if the subject is susceptible to said treatment using a method according to any one of statements 148-180.
[0484] 505. A method according to statement 504, wherein the method comprises administering to the subject one or more further therapeutically effective amounts of an agent capable of inhibiting or reversing EMT or a chemotherapeutic agent provided that the subject is identified as susceptible to said treatment.
[0485] 506. An agent capable of inhibiting or reversing EMT or chemotherapeutic agent for use in a method of treating a subject having, suspected of having, or diagnosed with acute myelocytic leukemia (AML),
   [0486] wherein the method is a method according to any one of statements 501-505.
[0487] 507. Use of an agent capable of inhibiting or reversing EMT or chemotherapeutic agent for use in a method of manufacture of a medicament for use in a method of treating a subject having, suspected of having, or diagnosed with acute myelocytic leukemia (AML),
   [0488] wherein the method of treatment is a method according to any one of statements 501-505.
[0489] 508. A method, agent for use, or use according to any one of statements 501-507, wherein the agent capable of inhibiting or reversing EMT or chemotherapeutic agent comprises an Axl inhibitor, Akt3 inhibitor, Slfn11 inhibitor, or PHGDH inhibitor.
[0490] 509. A method, agent for use, or use according to statement 508, wherein the agent capable of inhibiting or reversing EMT or chemotherapeutic agent comprises an Axl inhibitor.
[0491] 510. A method, agent for use, or use according to statement 509, wherein the Axl inhibitor is BGB324/R428/bemcentinib, cabozantinib, TP-0903, foretinib, merestinib, bosutinib, gilteritinib, crizotinib, amuvatinib, sunitinib, sitravatinib, LDC1267, UNC2025, or an anti-Axl antibody described in WO2015/193428, WO2015/193430, WO2016/097370, or WO2016/166296.
[0492] 511. A method, agent for use, or use according to statement 510, wherein the Axl inhibitor is BGB324/R428/bemcentinib.
[0493] 512. A method, agent for use, or use according to statement 510, wherein the Axl inhibitor is an anti-Axl antibody described in WO2015/193428, WO2015/193430, WO2016/097370, or WO2016/166296.
[0494] 512. A method, agent for use, or use according to statement 508, wherein the agent capable of inhibiting or reversing EMT or chemotherapeutic agent comprises an Akt3 inhibitor.
[0495] 513. A method, agent for use, or use according to statement 512, wherein the Akt3 inhibitor is an Akt3 inhibitor disclosed in WO2016/102672.
[0496] 514. A method, agent for use, or use according to any one of statements 501-513, wherein the agent capable of inhibiting or reversing EMT or chemotherapeutic agent is administered as a single agent.
[0497] 515. A method, agent for use, or use according to any one of statements 501-513, wherein the agent capable of inhibiting or reversing EMT or chemotherapeutic agent is administered in combination with a further cancer treatment.
[0498] 516. A method, agent for use, or use according to statement 515, wherein the further cancer treatment is selected from the further cancer treatments listed in statement 130.
[0499] 517. A method, agent for use, or use according to statement 515, wherein the further cancer treatment is a pyrimidine analogue, for example azacitidine, capecitabine, cytarabine, edatrexate, floxuridine, fluorouracil, gemcitabine, or troxacitabine, or a cytidine analogue, for example decitabine.
[0500] 518. A method, agent for use, or use according to statement 517, wherein the further cancer treatment is cytarabine.
[0501] 519. A method, agent for use, or use according to statement 517, wherein the further cancer treatment is decitabine.

[0502] Facet 2: Myelodysplastic Syndrome (MDS)

[0503] Myelodysplastic syndromes (MDS) are a diverse group of clonal and malignant myeloid disorders characterized by ineffective hematopoiesis, resultant peripheral cytopenias, and increased risk of progression to acute myeloid leukemia. Chemotherapeutic drug therapies for MDS include lenalidomide, antithymocyte globulin, azacitidine, and decitabine. However, current therapies are limited in their efficacy, and their remains a need for combination and targeted therapies for treatment of MDS (Ma et al, 2018).

[0504] Accordingly, robust biomarkers for predicting cancer-related outcomes in a subject having MDS, for example susceptibility to treatment with an agent capable of inhibiting or reversing EMT or a chemotherapeutic agent, would be useful in identifying subjects who are most likely to respond to or benefit from treatment with a particular agent/regimen.

[0505] A “responder” subject as described herein is a subject who is likely to, or who does, respond to treatment (or benefit from treatment) with an agent capable of inhibiting or reversing EMT or a chemotherapeutic agent, for example the small molecule Axl kinase inhibitor BGB324/R428/bemcentinib when administered either as a single agent or in combination with another cancer treatment.

[0506] Correspondingly, a “non-responder” subject as described herein is a subject who is not likely to, or who does not, respond to treatment (or benefit from treatment) with an agent capable of inhibiting or reversing EMT or a chemotherapeutic agent, for example the small molecule Axl kinase inhibitor BGB324/R428/bemcentinib when administered either as a single agent or in combination with another cancer treatment.

[0507] To “respond to treatment” or “benefit from treatment” as used herein means to experience an overall clinical benefit from the treatment. This overall clinical benefit can be any of: prolonged survival, partial or complete disease remission, (for example, as assessed by % bone marrow myeloblasts and/or normal maturation of cell lines), slowing or absence of disease progression (for example, as assessed by change in % bone marrow myeloblasts), improved quality of life (for example, as assessed using a health-related quality of life questionnaire such as a Functional Assessment of Cancer Therapy (FACT) questionnaire), progression-free survival, hematologic improvement (for example: increased blood haemoglobin, platelet count, and/or neutrophil count), bone marrow response (for example: bone marrow with 5% myeloblasts; 30%, 40%, 50% or more reduction in bone marrow myeloblasts; absence of circulating myeloblasts and myeloblasts with Auer rods; absence of extramedullary disease), hematologic recovery (for example: ≥11 g/dL haemoglobin, ≥100×10⁹/L platelets, and/or ≥1×10⁹/L neutrophils in peripheral blood), negative response for a genetic marker (for example, CEBPA, NPM1, or FLT3), or any other positive patient outcome.

[0508] Biomarkers

[0509] The term “marker” or “biomarker” is used herein to refer to a gene or protein whose expression in a subject or sample derived from a subject is altered or modulated, for example, up or down regulated, in cancer. Where the biomarker is a protein, modulation or alteration of expression encompasses modulation through different post-translational modifications.

[0510] In accordance with any aspect of this facet of the present disclosure the biomarkers described herein may be defined as follows, wherein:
[0511] an Axl biomarker comprises an amino acid sequence having at least 70%, 80%, 90%, 95%, 99% or 100% sequence identity with the full-length of the amino acid sequence disclosed at UniProt accession no: P30530-1 or P30530-2 (entry version 196) or a fragment thereof;
[0512] a Transferrin receptor protein 1 (TFR1) biomarker comprises an amino acid sequence having at least 70%, 80%, 90%, 95%, 99% or 100% sequence identity with the full-length of the amino acid sequence disclosed at UniProt accession no: P02786 (entry version 222) or a fragment thereof;
[0513] a FASLG Receptor (FAS) biomarker comprises an amino acid sequence having at least 70%, 80%, 90%, 95%, 99% or 100% sequence identity with the full-length of the amino acid sequence disclosed at UniProt accession no: P25445-1, P25445-2, P25445-3, P25445-4, P25445-5, P25445-6, or P25445-7 (entry version 227) or a fragment thereof;
[0514] an Interleukin-8 (IL-8) biomarker comprises an amino acid sequence having at least 70%, 80%, 90%, 95%, 99% or 100% sequence identity with the full-length of the amino acid sequence disclosed at UniProt accession no: P10145 (entry version 210) or a fragment thereof;
[0515] a Tamm-Horsfall Urinary Glycoprotein (THP) biomarker comprises an amino acid sequence having at least 70%, 80%, 90%, 95%, 99% or 100% sequence identity with the full-length of the amino acid sequence disclosed at UniProt accession no: P07911-1, P07911-2, P07911-3, P07911-4, or P07911-5 (entry version 182) or a fragment thereof;
[0516] a TNF-Related Apoptosis-Inducing Ligand Receptor 3 (TRAIL-R3) biomarker comprises an amino acid sequence having at least 70%, 80%, 90%, 95%, 99% or 100% sequence identity with the full-length of the amino acid sequence disclosed at UniProt accession no: 014798 (entry version 152) or a fragment thereof;
[0517] a Macrophage-Derived Chemokine (MDC) biomarker comprises an amino acid sequence having at least 70%, 80%, 90%, 95%, 99% or 100% sequence identity with the full-length of the amino acid sequence disclosed at UniProt accession no: 000626 (entry version 153) or a fragment thereof;
[0518] an Antileukoproteinase (ALP) biomarker comprises an amino acid sequence having at least 70%, 80%, 90%, 95%, 99% or 100% sequence identity with the full-length of the amino acid sequence disclosed at UniProt accession no: P03973 (entry version 184) or a fragment thereof;
[0519] a Trefoil Factor 3 (TFF3) biomarker comprises an amino acid sequence having at least 70%, 80%, 90%, 95%, 99% or 100% sequence identity with the full-length of the amino acid sequence disclosed at UniProt accession no: Q07654 (entry version 161) or a fragment thereof;
[0520] a Fatty Acid-Binding Protein, adipocyte (FABP) biomarker comprises an amino acid sequence having at least 70%, 80%, 90%, 95%, 99% or 100% sequence identity with the full-length of the amino acid sequence disclosed at UniProt accession no: P15090 (entry version 183) or a fragment thereof;
[0521] a von Willebrand Factor (vWF) biomarker comprises an amino acid sequence having at least 70%, 80%, 90%, 95%, 99% or 100% sequence identity with the full-length of the amino acid sequence disclosed at UniProt accession no: P04275-1 or P04275-2 (entry version 233) or a fragment thereof;
[0522] a Vitamin D-Binding Protein (VDBP) biomarker comprises an amino acid sequence having at least 70%, 80%, 90%, 95%, 99% or 100% sequence identity with the full-length of the amino acid sequence disclosed at UniProt accession no: P02774-1, P02774-2, or P02774-3 (entry version 201) or a fragment thereof;
[0523] a Cystatin-B biomarker comprises an amino acid sequence having at least 70%, 80%, 90%, 95%, 99% or 100% sequence identity with the full-length of the amino acid sequence disclosed at UniProt accession no: P04080 (entry version 201) or a fragment thereof;
[0524] a Uteroglobin biomarker comprises an amino acid sequence having at least 70%, 80%, 90%, 95%, 99% or 100% sequence identity with the full-length of the amino acid sequence disclosed at UniProt accession no: P11684 (entry version 163) or a fragment thereof;
[0525] a Fibrinogen biomarker comprises an amino acid sequence having at least 70%, 80%, 90%, 95%, 99% or 100% sequence identity with the full-length of the amino acid sequence disclosed at UniProt accession no: P02671-1 or P02671-2 (entry version 227) or a fragment thereof;
[0526] an Epidermal Growth Factor Receptor (EGFR) biomarker comprises an amino acid sequence having at least 70%, 80%, 90%, 95%, 99% or 100% sequence identity with the full-length of the amino acid sequence disclosed at UniProt accession no: Q504U8 (entry version 138) or a fragment thereof; and/or
[0527] a Leptin biomarker comprises an amino acid sequence having at least 70%, 80%, 90%, 95%, 99% or 100% sequence identity with the full-length of the amino acid sequence disclosed at UniProt accession no: P41159 (entry version 176) or a fragment thereof.

[0528] The biomarkers described herein may also be defined as a nucleic acid (either DNA or RNA) having at least 70%, 80%, 90%, 95%, 99% or 100% sequence identity with the full-length nucleic acid sequence encoding any of the above amino acid sequences.

[0529] Identity may be as defined using sequence comparisons made using FASTA and FASTP (see Pearson & Lipman, 1988. Methods in Enzymology 183: 63-98). Parameters are preferably set, using the default matrix, as follows: Gapopen (penalty for the first residue in a gap): −12 for proteins/-16 for DNA; Gapext (penalty for additional residues in a gap): −2 for proteins/-4 for DNA; KTUP word length: 2 for proteins/6 for DNA.

[0530] Pre-Treatment Predictive Biomarkers and Methods

[0531] By analysing patient data obtained from clinical trial BGBC003 (NCT02488408), the authors have discovered that, prior to treatment of subjects having MDS, certain of the biomarkers described herein are present in the serum of “responder” subjects at higher levels than in the serum of “non-responder” subjects—see Example 1. Similarly, prior to treatment of the subject certain of the biomarkers described herein are present in the serum of “responder” subjects at lower levels than in the serum of “non-responder” subjects. Thus, by assessing the activity, expression, or amount of one or more of the biomarkers described herein prior to treatment with an agent capable of inhibiting or reversing EMT or a chemotherapeutic agent it is possible to determine the likelihood of that subject being susceptible or responsive to treatment with said agent.

[0532] Accordingly, in a first aspect of this facet, the disclosure provides a method of predicting a cancer-related outcome in a subject having, suspected of having, or diagnosed with myelodysplastic syndrome (MDS), the method comprising assessing the activity, expression, or amount of one or more of the biomarkers described herein in the subject, or in a sample derived from the subject.

[0533] In some embodiments the one or more biomarker is selected from the group consisting of: Axl, Transferrin receptor protein 1 (TFR1), FASLG Receptor (FAS), Interleukin-8 (IL-8), Tamm-Horsfall Urinary Glycoprotein (THP), TNF-Related Apoptosis-Inducing Ligand Receptor 3 (TRAIL-R3), Macrophage-Derived Chemokine (MDC), Antileukoproteinase (ALP), Trefoil Factor 3 (TFF3), Fatty Acid-Binding Protein, adipocyte (FABP), von Willebrand Factor (vWF), Vitamin D-Binding Protein (VDBP), Cystatin-B, Uteroglobin, Fibrinogen, Epidermal Growth Factor Receptor (EGFR), and/or Leptin.

[0534] A “cancer-related outcome” as described herein is a clinical prediction or prognosis associated with cancer. In some embodiments the cancer-related outcome is susceptibility to treatment with an agent capable of inhibiting or reversing EMT or a chemotherapeutic agent.

[0535] In some embodiments the method comprises assessing the activity, expression, or amount of one or more of the biomarkers described herein in the subject, or in a sample derived from the subject, to obtain a sample profile of the one or more biomarker; and, making a prediction based on the sample profile of the one or more biomarker.

[0536] A “sample profile” as used herein is a profile of numerical values or numerical ranges corresponding to the activity, expression, or amount of respective biomarkers determined in the subject or sample derived from the subject.

[0537] In some embodiments of the method the prediction is made by comparing the sample profile to a control profile. A “control profile” as used herein is a profile of numerical values or numerical ranges corresponding to the activity, expression, or amount of the same biomarkers as for the sample profile, determined in a control subject or population of control subjects. Suitable control profiles are described in more detail below.

[0538] Prior to treatment of a subject, certain of the biomarkers described herein have been found to exhibit up-regulated expression in “responder” subjects—that is, certain of the biomarkers described herein have been found to be present in the serum of “responder” subjects at higher levels than in the serum of “non-responder” subjects. Similarly, prior to treatment of a subject, certain of the biomarkers described herein have been found to exhibit down-regulated expression in “responder” subjects—that is, certain of the biomarkers described herein have been found to be present in the serum of “responder” subjects at lower levels than in the serum of “non-responder” subjects.

[0539] This difference in expression level between “responder” and “non-responder” subjects can also be expressed in the opposite way. That is to say, prior to treatment of a subject, certain of the biomarkers described herein have been found to exhibit down-regulated expression in “non-responder” subjects—that is, certain of the biomarkers described herein have been found to be present in the serum of “non-responder” subjects at lower levels than in the serum of “responder” subjects. Similarly, prior to treatment of a subject, certain of the biomarkers described herein have been found to exhibit up-regulated expression in “non-responder” subjects—that is, certain of the biomarkers described herein have been found to be present in the serum of “non-responder” subjects at higher levels than in the serum of “responder” subjects.

[0540] The discovery of these differential patterns of expression mean that, by assessing the activity, expression, or amount of one or more of the biomarkers described herein prior to treatment of a subject with an agent, it is possible to determine the likelihood of that subject being susceptible or responsive to treatment with said agent. Accordingly, in particularly preferred embodiments the sample profile is obtained before the subject is contacted with or administered the agent capable of inhibiting or reversing EMT or a chemotherapeutic agent.

[0541] A subject who is “susceptible to treatment” with an agent capable of inhibiting or reversing EMT or a chemotherapeutic agent is one who is likely to, or who does, respond to treatment (or benefit from treatment) with an agent capable of inhibiting or reversing EMT or a chemotherapeutic agent. That is, a subject who is “susceptible to treatment” with an agent is a “responder” subject for that agent, as defined above. A prediction that is “indicative of susceptibility” is one which suggests or points towards the likelihood that a subject will respond to or benefit from treatment.

[0542] In some embodiments the predictive methods of the disclosure comprise assessing the activity, expression, or amount of one or more of the biomarkers described herein in the subject, or in a sample derived from the subject, to obtain a sample profile of the one or more biomarker; and, making a prediction based on the sample profile of the one or more biomarker. In some embodiments of the method the prediction is made by comparing the sample profile to a control profile, wherein the control profile is a profile of numerical values or numerical ranges corresponding to the activity, expression, or amount of the same biomarkers as for the sample profile, determined in a control subject or population of control subjects.

[0543] In some embodiments the control profile may be obtained from a population of control subjects having MDS. In some embodiments the control profile may be obtained from a population of control subjects not having MDS. In other embodiments the control profile may be obtained from a control subject or population of control subjects having MDS and previously found to lack susceptibility to treatment with an agent capable of inhibiting or reversing EMT or a chemotherapeutic agent (that is, non-responder subjects).

[0544] In some embodiments the control profile may a predetermined profile of biomarker expression, activity, or amount values, for example a profile of “mean” values, “threshold” values, or “standard ranges” of values. This predetermined profile of biomarker expression, activity, or amount values can be obtained, for example, from a control subject or population of control subjects having MDS, a control subject or population of control subjects not having MDS, or a control subject or population of control subjects having MDS and previously found to lack susceptibility to treatment with an agent capable of inhibiting or reversing EMT or a chemotherapeutic agent (that is, non-responder subjects).

[0545] In some other embodiments the control profile may be obtained from a control subject or population of control subjects having MDS and previously found to be susceptible to treatment with an agent capable of inhibiting or reversing EMT or a chemotherapeutic agent (that is, responder subjects). In some embodiments the control profile may a predetermined profile of biomarker expression, activity, or amount values, for example a profile of “threshold”, values or “standard ranges” of values. This predetermined profile of biomarker expression, activity, or amount values can be obtained, for example, from a control subject or population of control subjects having MDS and previously found to be susceptible to treatment with an agent capable of inhibiting or reversing EMT or a chemotherapeutic agent (that is, responder subjects).

[0546] In some other embodiments the control profile may be obtained from a control sample having a known amount (for example a “threshold” amount) of the same biomarkers as will be determined in the sample profile. This threshold amount can be obtained, for example, from non-responder or responder subjects as outlined above.

[0547] The skilled person is readily able to determine suitable “mean”, “threshold”, or “standard range” values for a particular biomarker.

[0548] For example, a “mean” value may be determined by: assessing the activity, expression, or amount of a particular biomarker in a population of subjects having (or not having) MDS; and, averaging the biomarker activity, expression, or amount determined to determine a “mean” value.

[0549] For example, a “mean” value may be determined by: assessing the activity, expression, or amount of a particular biomarker in a population of subjects; determining which subjects in the population are susceptible to treatment with an agent capable of inhibiting or reversing EMT or a chemotherapeutic agent; and, averaging the biomarker activity, expression, or amount determined in subjects found to be susceptible to treatment with an agent capable of inhibiting or reversing EMT or a chemotherapeutic agent (that is, responder subjects) to determine a “mean” value.

[0550] For example, a “threshold” value may be determined by: assessing the activity, expression, or amount of a particular biomarker in a population of subjects; determining which subjects in the population are susceptible to treatment with an agent capable of inhibiting or reversing EMT or a chemotherapeutic agent; and, selecting as appropriate the highest or lowest biomarker activity, expression, or amount determined in a subject found to be susceptible to treatment with an agent capable of inhibiting or reversing EMT or a chemotherapeutic agent (that is, a responder subject) as the “threshold value”.

[0551] For example, a “standard range” of values may be determined by: assessing the activity, expression, or amount of a particular biomarker in a population of subjects having (or not having) MDS; and, determining a “standard range” of values based on this assessment.

[0552] For example, a “standard range” of values may be determined by: assessing the activity, expression, or amount of a particular biomarker in a population of subjects; determining which subjects in the population are susceptible to treatment with an agent capable of inhibiting or reversing EMT or a chemotherapeutic agent; and, determining a “standard range” of values for subjects found to be susceptible to treatment with an agent capable of inhibiting or reversing EMT or a chemotherapeutic agent (that is, a responder subject) based on this assessment.

[0553] Where the control profile is a predetermined profile of biomarker expression, activity, or amount values, this may be provided as a “look-up table” or data record. Predetermined control profiles of this type may be a profile of numerical values or numerical ranges corresponding to a measure of central tendency (such as an average, median or mean) amount of the respective biomarkers determined in a plurality of control subjects (for example non-responder or responder subjects as outlined above). The skilled person is readily able to determine both a measure of central tendency and a measure of variability within a population using standard protein quantification techniques and suitable statistical tools.

[0554] Accordingly, in embodiments in which the control profile is: obtained from a population of control subjects having MDS; obtained from a population of control subjects not having MDS; obtained from a control subject or population of control subjects having MDS and previously found to lack susceptibility to treatment with an agent capable of inhibiting or reversing EMT or a chemotherapeutic agent (that is non-responder subjects); a predetermined profile of biomarker expression, activity, or amount values (for example a profile of “average, median, or mean” values or “standard ranges” of values) obtained from non-responder subjects; obtained from a control sample having a known “average, median, or mean” value of biomarkers indicative of non-responder subjects; a predetermined profile of biomarker expression, activity, or amount “threshold” values obtained from responder subjects; or, obtained from a control sample having a known “threshold” value of biomarkers indicative of responder subjects; then, a higher activity, expression, or amount of one or more of the biomarkers described herein in a sample profile as compared with the control profile may be indicative of susceptibility to treatment with an agent capable of inhibiting or reversing EMT or a chemotherapeutic agent. Similarly, a lower activity, expression, or amount of one or more of the biomarkers described herein in the sample profile as compared with a control profile may be indicative of susceptibility to treatment with an agent capable of inhibiting or reversing EMT or a chemotherapeutic agent.

[0555] In some such embodiments, the method may comprise assessing the activity, expression, or amount of one or more of biomarker selected from: THP, TRAIL-R3, MDC, ALP, TFF3, FABP, vWF, VDBP, Cystatin-B, Uteroglobin, Fibrinogen, EGFR, and/or Leptin; wherein a higher activity, expression, or amount of one or more of said biomarkers in the sample profile as compared with the control profile is indicative of susceptibility to treatment with an agent capable of inhibiting or reversing EMT or a chemotherapeutic agent.

[0556] In some such embodiments, the method may comprise assessing the activity, expression, or amount of one or more of biomarker selected from: Axl, TFR1, FAS, and/or IL-8; wherein a lower activity, expression, or amount of one or more of said biomarkers in the sample profile as compared with the control profile is indicative of susceptibility to treatment with an agent capable of inhibiting or reversing EMT or a chemotherapeutic agent.

[0557] In some such embodiments: a lower activity, expression, or amount of Axl; and/or a lower activity, expression, or amount of TFR1; and/or a lower activity, expression, or amount of FAS; and/or a lower activity, expression, or amount of IL-8; and/or a higher activity, expression, or amount of THP; and/or a higher activity, expression, or amount of TRAIL-R3; and/or a higher activity, expression, or amount of MDC; and/or a higher activity, expression, or amount of ALP; and/or a higher activity, expression, or amount of TFF3; and/or a higher activity, expression, or amount of FABP; and/or a higher activity, expression, or amount of vWF; and/or a higher activity, expression, or amount of VDBP; and/or a higher activity, expression, or amount of Cystatin-B; and/or a higher activity, expression, or amount of Uteroglobin; and/or a higher activity, expression, or amount of Fibrinogen; and/or a higher activity, expression, or amount of EGFR; and/or a higher activity, expression, or amount of Leptin; in the sample profile as compared with the control profile is indicative of susceptibility to treatment with an agent capable of inhibiting or reversing EMT or a chemotherapeutic agent.

[0558] In embodiments in which the control profile is: obtained from a control subject or population of control subjects having MDS and previously found to be susceptible to treatment with an agent capable of inhibiting or reversing EMT or a chemotherapeutic agent (that is, responder subjects); then, if the expression, activity, or amount values in the sample profile are above a “threshold” value typical of a responder subject (that is, a subject having MDS and previously found to be susceptible to treatment with an agent capable of inhibiting or reversing EMT or a chemotherapeutic agent) this is indicative of susceptibility to treatment with an agent capable of inhibiting or reversing EMT or a chemotherapeutic agent. Similarly, if the expression, activity, or amount values in the sample profile are below the “threshold” value typical of a responder subject (that is, a subject having MDS and previously found to be susceptible to treatment with an agent capable of inhibiting or reversing EMT or a chemotherapeutic agent) this is indicative of a lack of susceptibility to treatment with an agent capable of inhibiting or reversing EMT or a chemotherapeutic agent.

[0559] In embodiments in which the control profile is: a predetermined profile of “standard ranges” of biomarker expression, activity, or amount values obtained from responder subjects; then, if the expression, activity, or amount values in the sample profile are within the “standard range” of values typical of a responder subject (that is, a subject having MDS and previously found to be susceptible to treatment with an agent capable of inhibiting or reversing EMT or a chemotherapeutic agent) this is indicative of susceptibility to treatment with an agent capable of inhibiting or reversing EMT or a chemotherapeutic agent. Similarly, if the expression, activity, or amount values in the sample profile are outside the “standard range” of values typical of a responder subject (that is, a subject having MDS and previously found to be susceptible to treatment with an agent capable of inhibiting or reversing EMT or a chemotherapeutic agent) this is indicative of a lack of susceptibility to treatment with an agent capable of inhibiting or reversing EMT or a chemotherapeutic agent.

[0560] In embodiments in which the control profile is: a predetermined profile of “standard ranges” of biomarker expression, activity, or amount values obtained from non-responder subjects; then, if the expression, activity, or amount values in the sample profile are within the “standard range” of values typical of a non-responder subject (that is, a subject having MDS and previously found to lack susceptibility to treatment with an agent capable of inhibiting or reversing EMT or a chemotherapeutic agent) this is indicative of a lack of susceptibility to treatment with an agent capable of inhibiting or reversing EMT or a chemotherapeutic agent. Similarly, if the expression, activity, or amount values in the sample profile are outside the “standard range” of values typical of a non-responder subject (that is, a subject having MDS and previously found to lack susceptibility to treatment with an agent capable of inhibiting or reversing EMT or a chemotherapeutic agent) this may be indicative of susceptibility to treatment with an agent capable of inhibiting or reversing EMT or a chemotherapeutic agent.

[0561] In embodiments in which the control profile is: obtained from a population of control subjects not having MDS; then, if the expression, activity, or amount values in the sample profile are outside a “standard range” of values typical of subjects not having MDS, this is indicative of susceptibility to treatment with an agent capable of inhibiting or reversing EMT or a chemotherapeutic agent. Similarly, if the expression, activity, or amount values in the sample profile are within a “standard range” of values typical of subjects not having MDS, this is indicative of a lack of susceptibility to treatment with an agent capable of inhibiting or reversing EMT or a chemotherapeutic agent. In such cases, an expression, activity or amount value may be outside the “standard range” of values when it is either above the upper limit of normal or below the lower limit of normal for a given biomarker. The upper limit of normal and lower limit of normal are the limits of the normal distribution of a given biomarker in a population of control subjects not having MDS.

[0562] The skilled person is readily able to determine whether the sample profile is indicative of susceptibility or lack of susceptibility to treatment with an agent capable of inhibiting or reversing EMT or a chemotherapeutic agent using suitable statistical tools and comparison with the appropriate control.

[0563] In some embodiments the sample profile may be compared with two or more control profiles as described above.

[0564] As used herein, the term “one or more” means 1, 2, 3, 4, 5, 6, 7, 8, 9, 10, 11, 12, 13, 14, 15, 16, 17, 18, 19, or 20 of the biomarkers described herein. In some embodiments the one or more biomarker is Axl. In some embodiments the one or more biomarker is TFR1. In some embodiments the one or more biomarker is FAS. In some embodiments the one or more biomarker is IL-8. In some embodiments the one or more biomarker is THP. In some embodiments the one or more biomarker is TRAIL-R3. In some embodiments the one or more biomarker is MDC. In some embodiments the one or more biomarker is ALP. In some embodiments the one or more biomarker is TFF3. In some embodiments the one or more biomarker is FABP. In some embodiments the one or more biomarker is vWF. In some embodiments the one or more biomarker is VDBP. In some embodiments the one or more biomarker is Cystatin B. In some embodiments the one or more biomarker is Uteroglobin. In some embodiments the one or more biomarker is Fibrinogen. In some embodiments the one or more biomarker is EGFR. In some embodiments the one or more biomarker is Leptin.

[0565] In some embodiments the method may comprise assessing the activity, expression, or amount of at least 2, 3, 4, 5, 6, 7, 8, 9, 10, 11, 12, 13, 14, 15, 20 of said biomarkers in the subject, or in a sample derived from the subject. In some embodiments the method may comprise assessing the activity, expression, or amount of Axl and at least 1, 2, 3, 4, 5, 6, 7, 8, 9, 10, 11, 12, 13, 14, 15, 20 further biomarkers described herein in the subject, or in a sample derived from the subject.

[0566] Subject

[0567] A “subject” as referred to herein is any species of animal classified as a mammal, and includes but is not restricted to, domestic and farm animals, primates and humans. In some preferred embodiments the subject is a human of any sex or race. In some embodiments, the human is an adult human.

[0568] In some embodiments the predictive methods described herein are performed before the subject receives a treatment or course of treatment for MDS. In other embodiments the predictive method is performed during or after a treatment or course of treatment for MDS. In some embodiments the treatment or course of treatment for MDS is an agent capable of inhibiting or reversing EMT. In other embodiments the treatment or course of treatment for MDS is a chemotherapeutic treatment that is not an agent capable of inhibiting or reversing EMT.

[0569] In some embodiments of the predictive methods described herein the subject has previously been treated with an agent capable of inhibiting or reversing EMT or a chemotherapeutic agent. In some embodiments the subject has previously been treated with an agent selected from: a PHGDH inhibitor, a Slfn11 inhibitor, an Axl inhibitor, or an Akt3 inhibitor.

[0570] In some embodiments of the predictive methods described herein the subject has previously been treated with an agent that is different to the agent capable of inhibiting or reversing EMT or chemotherapeutic agent for which the subject's response is being predicted. That is, the subject has previously been treated with an agent that is not the agent which the predictive method is determining the subject's susceptibility to. Accordingly, in some embodiments, the subject has not previously been treated with an agent capable of inhibiting or reversing EMT or a chemotherapeutic agent. In some preferred embodiments, the subject has not previously been treated with an Axl inhibitor. In other preferred embodiments, the subject has not previously been treated with an Akt3 inhibitor.

[0571] Post-Treatment Changes in Biomarkers

[0572] In some embodiments of this aspect of the disclosure, the predictive method further comprises a subsequent step of assessing the activity, expression, or amount of one or more biomarker in the subject, or in a sample derived from the subject, to obtain a second sample profile of one or more of the biomarkers described herein after the subject has received a treatment or course of treatment an agent capable of inhibiting or reversing EMT or a chemotherapeutic agent.

[0573] That is, in some embodiments, the predictive method comprises:
[0574] (a) determining if a subject is susceptible to treatment with an agent capable of inhibiting or reversing EMT or a chemotherapeutic agent by assessing the activity, expression, or amount of one or more biomarker in the subject, as outlined above;
[0575] (b) administering to the subject a therapeutically effective amount of an agent capable of inhibiting or reversing EMT or a chemotherapeutic agent; and
[0576] (c) subsequently assessing the activity, expression, or amount of one or more biomarker in the subject, or in a sample derived from the subject.

[0577] In some embodiments, the predictive method comprises:
[0578] (a) determining if a subject is susceptible to treatment with an agent capable of inhibiting or reversing EMT or a chemotherapeutic agent by assessing the activity, expression, or amount of one or more biomarker in the subject, or in a sample derived from the subject, wherein the one or more biomarker is selected from the group consisting of: Axl, TFR1, FAS, IL-8, THP, TRAIL-R3, MDC, ALP, TFF3, FABP, vWF, VDBP, Cystatin-B, Uteroglobin, Fibrinogen, EGFR, and/or Leptin;
[0579] (b) administering to the subject a therapeutically effective amount of an agent capable of inhibiting or reversing EMT or a chemotherapeutic agent; and
[0580] (c) subsequently assessing the activity, expression, or amount of one or more biomarker in the subject, or in a sample derived from the subject.

[0581] In some preferred embodiments the methods comprise subsequently assessing the activity, expression, or amount of Axl in the subject, or in a sample derived from the subject. In some embodiments an increase in the activity, expression, or amount of Axl in the second sample profile as compared with a control profile after contacting the subject with a cancer therapeutic agent is indicative of higher susceptibility to treatment with an agent capable of inhibiting or reversing EMT or a chemotherapeutic agent. In some preferred embodiments the control profile is obtained from the same subject prior to treatment with an agent capable of inhibiting or reversing EMT or a chemotherapeutic agent.

[0582] Post-Treatment Predictive Biomarkers and Methods

[0583] By analysing patient data obtained from clinical trial BGBC003 (NCT02488408), the authors have discovered that, following treatment of subjects having MDS with an agent capable of inhibiting or reversing EMT or a chemotherapeutic agent, the levels of certain of the biomarkers described herein increases in the serum of “responder” subjects but not in the serum of “non-responder” subjects—see Example 1. Similarly, following treatment with an agent capable of inhibiting or reversing EMT or a chemotherapeutic agent, the levels of certain of the biomarkers described herein decreases in the serum of “responder” subjects but not in the serum of “non-responder” subjects. Thus, by assessing the activity, expression, or amount of one or more of the biomarkers described herein prior to and following treatment with an agent capable of inhibiting or reversing EMT or a chemotherapeutic agent it is possible to determine or confirm that the subject is susceptible or responsive to treatment with said agent.

[0584] Accordingly, in a second aspect of this facet, the disclosure provides a method of predicting a cancer-related outcome in a subject having, suspected of having, or diagnosed with myelodysplastic syndrome (MDS), the method comprising assessing the activity, expression, or amount of one or more of the biomarkers described herein in a subject, or in a sample derived from the subject after the subject has been contacted with an agent capable of inhibiting or reversing EMT or a chemotherapeutic agent. In some embodiments the cancer-related outcome is susceptibility to treatment with an agent capable of inhibiting or reversing EMT or a chemotherapeutic agent.

[0585] In some embodiments the method comprises assessing the activity, expression, or amount of one or more of the biomarkers described herein in the subject, or in a sample derived from the subject, to obtain a sample profile of the one or more biomarker; and, making a prediction based on the sample profile of the one or more biomarker. In some embodiments of the method the prediction is made by comparing the sample profile to a control profile. In preferred embodiments the sample profile is obtained after contacting the subject with an agent capable of inhibiting or reversing EMT or a chemotherapeutic agent.

[0586] A “control profile” as used herein is a profile of numerical values or numerical ranges corresponding to the activity, expression, or amount of the same biomarkers as for the sample profile, determined in a control subject or population of control subjects.

[0587] In preferred embodiments of this aspect of the disclosure the control profile is obtained from the same subject prior to treatment with an agent capable of inhibiting or reversing EMT or a chemotherapeutic agent. In some embodiments the control profile is obtained from a population of control subjects having MDS. In other embodiments, the control profile is a predetermined profile of biomarker expression, activity, or amount values, for example a profile of “threshold” values or “standard ranges” of values.

[0588] Accordingly, in embodiments in which the control profile is obtained from the same subject prior to treatment with an agent capable of inhibiting or reversing EMT or a chemotherapeutic agent, an increase in the activity, expression, or amount of one or more biomarker in the sample profile as compared with a control profile after contacting the subject with an agent capable of inhibiting or reversing EMT or a cancer therapeutic agent may be indicative of susceptibility to treatment with an agent capable of inhibiting or reversing EMT or a chemotherapeutic agent. In such embodiments, a decrease in the activity, expression, or amount of one or more biomarker in the sample profile as compared with a control profile after contacting the subject with a cancer therapeutic agent may be indicative of higher susceptibility to treatment with an agent capable of inhibiting or reversing EMT or a chemotherapeutic agent.

[0589] In some such embodiments, an increase in the activity, expression, or amount of one or more biomarker in the sample profile as compared with a control profile after contacting the subject with a cancer therapeutic agent may be indicative of lower susceptibility to treatment with an agent capable of inhibiting or reversing EMT or a chemotherapeutic agent. In some such embodiments, a decrease in the activity, expression, or amount of one or more biomarker in the sample profile as compared with a control profile after contacting the subject with a cancer therapeutic agent may be indicative of lower susceptibility to treatment with an agent capable of inhibiting or reversing EMT or a chemotherapeutic agent.

[0590] In some preferred embodiments the one or more biomarker includes at least Axl. In some embodiments the one or more biomarker is Axl. In some embodiments an increase in the activity, expression, or amount of Axl in the sample profile as compared with a control profile after contacting the subject with a cancer therapeutic agent is indicative of higher susceptibility to treatment with an agent capable of inhibiting or reversing EMT or a chemotherapeutic agent.

[0591] Subject

[0592] A “subject” as referred to herein is any species of animal classified as a mammal, and includes but is not restricted to, domestic and farm animals, primates and humans. In some preferred embodiments the subject is a human of any sex or race. In some embodiments, the human is an adult human.

[0593] In some embodiments of this aspect of the disclosure, the subject was selected for treatment with the agent capable of inhibiting or reversing EMT or a chemotherapeutic agent, using a predictive method according to the first aspect of this facet of the disclosure outlined above.

[0594] Agents Capable of Inhibiting or Reversing EMT

[0595] The present disclosure provides methods for predicting a cancer-related outcome in a subject having, suspected of having, or diagnosed with myelodysplastic syndrome (MDS). A “cancer-related outcome” is a clinical prediction or prognosis associated with cancer.

[0596] The agents capable of inhibiting or reversing EMT for use in this MDS facet of the disclosure are defined as described above in the AML facet (see identically titled section above on page 14, line 19 to page 17, line 7).

[0597] Assessing Biomarker Activity, Expression, Amount

[0598] In some embodiments of the predictive methods described herein, assessing the activity, expression, or amount of one or more biomarker in a subject, or in a sample derived from a subject, comprises: contacting a sample, or an extract from a sample, with at least 1, 2, 3, 4, 5, 6, 7, 8, 9, 10 or more reagents for detecting the activity, expression, or amount of one or more biomarkers, each of which is selective for a particular biomarker; and, detecting and/or quantifying said reagents for detecting.

[0599] In some preferred embodiments, assessing the expression or amount of the one or more biomarker comprises determining the level of the one or more biomarker protein or mRNA in the subject or sample derived from the subject. Preferably the expression or amount of the one or more biomarker is assessed by determining the level of protein expression. In particularly preferred embodiments the expression or amount of the one or more biomarker is assessed by determining the level of protein expression in serum.

[0600] The term “expression” refers to the transcription of a gene's DNA template to produce the corresponding mRNA and translation of this mRNA to produce the corresponding gene product (i.e., a peptide, polypeptide, or protein) as well as the “expression” of a protein in one or more forms that may have been modified post translation.

[0601] In some embodiments determining the level of the one or more biomarker protein or mRNA comprises: contacting a sample, or an extract from a sample, with at least 1, 2, 3, 4, 5, 6, 7, 8, 9, 10 or more specific binding members, each of which selectively binds to a respective biomarker protein or mRNA; and, detecting and/or quantifying formation of complex formed by said specific binding member and said biomarker protein or mRNA. In some embodiments the specific binding member may comprise an antibody molecule or a binding fragment thereof.

[0602] A range of suitable techniques for determining protein and mRNA expression levels are well known in the art, for example microarray analysis, Western blotting, and PCR techniques such as QPCR. In some embodiments, determining the expression or amount of the one or more biomarker protein or mRNA may comprise use of a technique selected from: Western blot; enzyme-linked immunosorbent assay (ELISA); radioimmunoassay (RIA); competitive enzyme immunoassay; double antibody sandwich ELISA (DAS-ELISA); liquid immunoarray technology; immunocytochemistry; immunohistochemistry; antibody microarray detection; precipitation of colloidal gold; affinity chromatography; ligand binding assay; and lectin binding assay.

[0603] In some embodiments, the expression or amount of the one or more biomarker is determined as an absolute amount of the respective biomarker protein or mRNA in the sample. In such cases, the respective biomarker protein or mRNA may be quantified in the sample and the amount expressed as a measure of the sample, for example the volume, mass, or total protein content of the sample.

[0604] In some embodiments, the expression or amount of the one or more biomarker is determined as a relative amount of the respective biomarker protein or mRNA in the sample, wherein the relative amount is determined relative to a reference protein or mRNA in the sample. Determining the relative amount of biomarker protein or mRNA in this way allows for normalisation to, e.g., account for differences in total protein concentration and to remove bias from sample to sample.

[0605] Preferably the reference protein or mRNA is one whose expression or amount does not vary significantly between subjects having cancer and subjects not having cancer, in particular MDS. That is, the reference protein or mRNA is preferably one whose expression or amount is not altered by MDS. Accordingly, the reference protein or mRNA may comprise one or more protein or mRNA which is not one of the biomarkers described herein. When expressing the expression or amount of the one or more biomarker as a relative amount, the absolute amount of the respective biomarker protein or mRNA in the sample may be divided by the absolute amount of the reference protein or mRNA in the sample.

[0606] Assessing Biomarker Expression at the RNA Level

[0607] Gene expression can be detected at the RNA level. RNA may be extracted from cells using RNA extraction techniques including, for example, using acid phenol/guanidine isothiocyanate extraction (RNAzol B; Biogenesis), RNeasy RNA preparation kits (Qiagen) or PAXgene (PreAnalytix, Switzerland). Typical assay formats utilising ribonucleic acid hybridisation include nuclear run-on assays, RT-PCR, RNase protection assays (Melton et al., Nuc. Acids Res. 12:7035), Northern blotting and In Situ hybridization. Gene expression can also be detected by microarray analysis as described below.

[0608] Assessing Biomarker Expression at the Protein Level

[0609] Preferably biomarker level is assessed by measuring protein expression. Altered gene or protein expression may also be detected by measuring the polypeptides encoded by the gene. This may be achieved by using molecules which bind to the polypeptides encoded by the biomarker gene. Suitable molecules/agents which bind either directly or indirectly to the polypeptides in order to detect the presence of the protein include naturally occurring molecules such as peptides and proteins, for example antibodies, or they may be synthetic molecules.

[0610] Antibodies may be derived from commercial sources or through techniques which are familiar to those skilled in the art. In one embodiment, and where altered expression manifests itself through the expression of alteration of post translationally-modified forms of a protein biomarker, antibodies specific for those different forms may be used. For the purposes of this disclosure, the term “antibody”, unless specified to the contrary, includes whole antibodies, or fragments of whole antibodies which retain their binding activity for a target antigen. Such fragments include Fv, F(ab′) and F(ab′)2 fragments, as well as single chain antibodies (scFv). Furthermore, the antibodies and fragments thereof may be humanised antibodies, for example as described in EP239400A. For example: monoclonal and polyclonal antibodies, recombinant antibodies, proteolytic and recombinant fragments of antibodies (Fab, Fv, scFv, diabodies), single-domain antibodies (VHH, sdAb, nanobodies, IgNAR, VNAR), and proteins unrelated to antibodies, which have been engineered to have antibody-like specific binding. Antibodies may be bound to a solid support and/or packaged into kits in a suitable container along with suitable reagents, controls, instructions and the like.

[0611] Arrays

[0612] Array technology and the various techniques and applications associated with it are well known in the art. Array technology overcomes the disadvantages with traditional methods in molecular biology, which generally work on a “one gene in one experiment” basis, resulting in low throughput and the inability to appreciate the “whole picture” of gene function. In the context of the products and methods of the present disclosure, array technology can be used, for example, in the analysis of the expression of biomarker proteins or mRNA.

[0613] In general, any library or group of samples may be arranged in an orderly manner into an array, by spatially separating the members of the library or group. Examples of suitable libraries for arraying include nucleic acid libraries (including DNA, cDNA, oligonucleotide, etc. libraries), peptide, polypeptide and protein libraries, as well as libraries comprising any molecules, such as ligand libraries, among others. Accordingly, where reference is made to a “library” in this document, unless the context dictates otherwise, such reference should be taken to include reference to a library in the form of an array.

[0614] Proteins, polypeptides, etc., may also be immobilised in arrays. For example, antibodies have been used in microarray analysis of the proteome using protein chips (Borrebaeck C A, 2000, Immunol Today 21(8):379-82). Polypeptide arrays are reviewed in, for example, MacBeath and Schreiber, 2000, Science, 289(5485):1760-1763.

[0615] Sample

[0616] Suitable samples include, but are not limited to, tissue samples such as tissue biopsy, blood, urine, buccal scrapes etc., as well as serum, plasma, or tissue culture supernatant samples. In preferred embodiments the expression or amount of the one or more biomarker is assessed by determining the level of protein expression in the sample. In some preferred embodiments the sample is a blood, serum, or plasma sample. In some particularly preferred embodiments the sample is a serum sample.

[0617] When assessing the expression or amount of the one or more biomarker proteins or mRNA in serum or plasma samples derived from a subject, samples are removed and subjected to analytical techniques such as flow cytometry, mass cytometry (CyTOF), ELISA, PET, and SELDI-TOF MS. In some embodiments, the method may comprise extracting RNA from said sample and detecting gene expression by QPCR. In some other embodiments, gene expression may be detected by detecting protein products by, for example, Western Blot.

[0618] In some embodiments, the level of expression of the one or more biomarker is assessed by determining the copy number of the gene encoding the one or more biomarker. Copy number (i.e. gene duplication events) may be determined using standard techniques known in the art, e.g. using a DNA chip as described in Jiang et al. (Jiang Q, Ho Y Y, Hao L, Nichols Berrios C, Chakravarti A. Copy number variants in candidate genes are genetic modifiers of Hirschsprung disease. PLoS One. 2011; 6(6)).

[0619] Is some preferred embodiments of the predictive methods described herein, the method is performed in vitro or ex vivo.

[0620] Methods of Selecting a Subject for Treatment

[0621] A third aspect of this facet of the present disclosure relates to methods of selecting subjects having, suspected of having, or diagnosed with myelodysplastic syndrome (MDS) for treatment with an agent capable of inhibiting or reversing EMT or a chemotherapeutic agent. In some embodiments the method comprises: identifying subjects susceptible to treatment with an agent capable of inhibiting or reversing EMT or a chemotherapeutic agent using a predictive method defined in accordance with the above described first and second aspects of this facet of the disclosure; and, selecting thus identified subjects for treatment.

[0622] In some embodiments this aspect relates to methods of selecting subjects having, suspected of having, or diagnosed with myelodysplastic syndrome (MDS) for continued treatment with an agent capable of inhibiting or reversing EMT or a chemotherapeutic agent. In some embodiments the method comprises: identifying subjects susceptible to treatment with an agent capable of inhibiting or reversing EMT or a chemotherapeutic agent using a predictive method defined in accordance with the above described second aspect of this facet of the disclosure; and, selecting thus identified subjects for treatment.

[0623] In some embodiments of this aspect of the disclosure, the treatment comprises administering to the subject a therapeutically effective amount of an agent capable of inhibiting or reversing EMT or a chemotherapeutic agent as described herein. Accordingly, in some embodiments the treatment comprises an Axl inhibitor, Akt3 inhibitor, Slfn11 inhibitor, or PHGDH inhibitor. In some preferred embodiments the treatment comprises an Axl inhibitor, for example, BGB324/R428/bemcentinib, cabozantinib, TP-0903, foretinib, merestinib, bosutinib, gilteritinib, crizotinib, amuvatinib, sunitinib, sitravatinib, LDC1267, or UNC2025. Other Axl inhibitors include the anti-Axl antibodies described in WO2015/193428, WO2015/193430, WO2016/097370, and WO2016/166296. In some preferred embodiments the Axl inhibitor is an anti-Axl antibody described in WO2015/193428, WO2015/193430, WO2016/097370, or WO2016/166296. In some particularly preferred embodiments the Axl inhibitor is BGB324/R428/bemcentinib.

[0624] In some other preferred embodiments, the treatment comprises an Akt3 inhibitor. In some embodiments the Akt3 inhibitor is an Akt3 inhibitor disclosed in WO2016/102672.

[0625] In some embodiments of this aspect of the disclosure, the treatment is administered as a single agent. In other embodiments, the treatment is administered in combination with a further cancer treatment. Suitable further cancer treatments are outlined in detail above. In some embodiments the further cancer treatment is a pyrimidine analogue, for example azacitidine, capecitabine, cytarabine, edatrexate, floxuridine, fluorouracil, gemcitabine, or troxacitabine, or a cytidine analogue, for example decitabine. In some particularly preferred embodiments the further cancer treatment is cytarabine. In other particularly preferred embodiments the further cancer treatment is decitabine.

[0626] Kits

[0627] A fourth aspect of this facet of the present disclosure relates to diagnostic kits and test devices. In some embodiments the disclosure provides a diagnostic kit comprising 1, 2, 3, 4, 5, 6, 7, 8, 9, 10 or more reagents for detecting the activity, expression, or amount of one or more of the biomarkers described herein, each of which is selective for a particular biomarker. In some embodiments each of the reagents for detecting is selective for a biomarker selected from the group consisting of: Axl, TFR1, FAS, IL-8, THP, TRAIL-R3, MDC, ALP, TFF3, FABP, vWF, VDBP, Cystatin-B, Uteroglobin, Fibrinogen, EGFR, and/or Leptin.

[0628] In other embodiments the disclosure provides a test device comprising 1, 2, 3, 4, 5, 6, 7, 8, 9, 10 or more reagents for detecting the activity, expression, or amount of one or more of the biomarkers described herein, each of which is selective for a particular biomarker. In some embodiments each of the reagents for detecting is selective for a biomarker selected from the group consisting of: Axl, TFR1, FAS, IL-8, THP, TRAIL-R3, MDC, ALP, TFF3, FABP, vWF, VDBP, Cystatin-B, Uteroglobin, Fibrinogen, EGFR, and/or Leptin.

[0629] In some embodiments the diagnostic kit or test device comprises 1, 2, 3, 4, 5, 6, 7, 8, 9, 10 or more specific binding members, each of which selectively binds to one of the biomarkers described herein; and, one or more reagents for detecting said one or more specific binding members, or one or more reagents for detecting and/or quantifying formation of a complex formed by said specific binding member and said biomarker. In some embodiments each specific binding member selectively binds to a biomarker selected from the group consisting of: Axl, TFR1, FAS, IL-8, THP, TRAIL-R3, MDC, ALP, TFF3, FABP, vWF, VDBP, Cystatin-B, Uteroglobin, Fibrinogen, EGFR, and/or Leptin.

[0630] In some embodiments the diagnostic kit or test device comprises a specific binding member which selectively binds to Axl, and at least 1, 2, 3, 4, 5, 6, 7, 8, 9, 10, or more specific binding members, each of which selectively binds to a biomarker selected from the group consisting of: TFR1, FAS, IL-8, THP, TRAIL-R3, MDC, ALP, TFF3, FABP, vWF, VDBP, Cystatin-B, Uteroglobin, Fibrinogen, EGFR, and/or Leptin.

[0631] In some embodiments of this aspect of the disclosure the diagnostic kit or test device comprises a plurality of said specific binding members provided in the form of an array on a substrate or conjugated to a plurality of particles, such as beads or microspheres. The particles may be encoded with a detectable label. In some embodiments the specific binding member comprises an antibody molecule or a binding fragment thereof.

[0632] In some embodiments of the diagnostic kit or test device detecting formation of a complex formed by a specific binding member and a biomarker is carried out by use of a technique selected from: Western blot; enzyme-linked immunosorbent assay (ELISA); radioimmunoassay (RIA); competitive enzyme immunoassay; double antibody sandwich ELISA (DAS-ELISA); liquid immunoarray technology; immunocytochemistry; immunohistochemistry; antibody microarray detection; precipitation of colloidal gold; affinity chromatography; ligand binding assay; and lectin binding assay.

[0633] In some embodiments of the diagnostic kit or test device, the kit or test device comprises no more than 15, 20, 25, 30, 40, or 50 reagents for detecting. In some embodiments of the diagnostic kit or test device, the kit or test device comprises no more than 15, 20, 25, 30, 40, or 50 specific binding members.

[0634] The present disclosure also provides use of such diagnostic kits and test devices in methods of predicting a cancer-related outcome in a subject. In preferred embodiments the cancer-related outcome is susceptibility to treatment with an agent capable of inhibiting or reversing EMT or a chemotherapeutic agent as described herein.

[0635] In some embodiments the agent capable of inhibiting or reversing EMT or chemotherapeutic agent is an Axl inhibitor, Akt3 inhibitor, Slfn11 inhibitor, or PHGDH inhibitor. In some preferred embodiments the agent capable of inhibiting or reversing EMT or chemotherapeutic agent is an Axl inhibitor, for example BGB324/R428/bemcentinib, cabozantinib, TP-0903, foretinib, merestinib, bosutinib, gilteritinib, crizotinib, amuvatinib, sunitinib, sitravatinib, LDC1267, or UNC2025. Other Axl inhibitors include the anti-Axl antibodies described in WO2015/193428, WO2015/193430, WO2016/097370, and WO2016/166296. In some preferred embodiments the Axl inhibitor is an anti-Axl antibody described in WO2015/193428, WO2015/193430, WO2016/097370, or WO2016/166296. In some particularly preferred embodiments the Axl inhibitor is BGB324/R428/bemcentinib.

[0636] In some embodiments of the diagnostic kit or test device for use in a predictive method, the subject has, is suspected of having, or has been diagnosed with MDS.

[0637] In some embodiments the method may be as defined in accordance with the above described first and second aspects of this facet of the disclosure.

[0638] A fifth aspect of this facet of the present disclosure relates to the use of a reagent for detecting the activity, expression, or amount of a biomarker selected from the group consisting of: Axl, TFR1, FAS, IL-8, THP, TRAIL-R3, MDC, ALP, TFF3, FABP, vWF, VDBP, Cystatin-B, Uteroglobin, Fibrinogen, EGFR, and/or Leptin, in a method of predicting a cancer-related outcome in a subject.

[0639] A sixth aspect of this facet of the disclosure relates to the use of 1, 2, 3, 4, 5, 6, 7, 8, 9, 10 or more reagents for detecting the activity, expression, or amount a biomarker, each of which is selective for a particular biomarker selected from the group consisting of: Axl, TFR1, FAS, IL-8, THP, TRAIL-R3, MDC, ALP, TFF3, FABP, vWF, VDBP, Cystatin-B, Uteroglobin, Fibrinogen, EGFR, and/or Leptin, in a method of manufacture of a diagnostic kit or test device for use in a method of predicting a cancer-related outcome in a subject. In some embodiments of these uses the reagent for detecting comprises a specific binding member selective for a particular biomarker. The specific binding member may comprise an antibody molecule or a binding fragment thereof.

[0640] In some embodiments the method may be as defined in accordance with the above described first and second aspects of this facet of the disclosure.

[0641] Uses

[0642] A seventh aspect of this facet of the present disclosure relates to the use of one or more of: Axl, TFR1, FAS, IL-8, THP, TRAIL-R3, MDC, ALP, TFF3, FABP, vWF, VDBP, Cystatin-B, Uteroglobin, Fibrinogen, EGFR, and/or Leptin, as a biomarker for determining if a subject is susceptible to treatment with an agent capable of inhibiting or reversing EMT or a chemotherapeutic agent.

[0643] In some embodiments the use relates to use of Axl, and at least 1, 2, 3, 4, 5, 6, 7, 8, 9, 10, or more of: TFR1, FAS, IL-8, THP, TRAIL-R3, MDC, ALP, TFF3, FABP, vWF, VDBP, Cystatin-B, Uteroglobin, Fibrinogen, EGFR, and/or Leptin, as a biomarker for determining if a subject is susceptible to treatment with an agent capable of inhibiting or reversing EMT or a chemotherapeutic agent.

[0644] In some embodiments the use is as a biomarker in a method as defined in accordance with the above described first and second aspects of this facet of the disclosure.

[0645] Methods of Treating a Subject

[0646] An eighth aspect of this facet of the present disclosure relates to methods of treating a subject having, suspected of having, or diagnosed with myelodysplastic syndrome (MDS). In some embodiments the method comprises: identifying a subject for treatment using a predictive method defined in accordance with the above described first and second aspects of this facet of the disclosure; and, administering to the subject a therapeutically effective amount of an agent capable of inhibiting or reversing EMT or a chemotherapeutic agent.

[0647] Accordingly, in some embodiments, the method comprises: (a) obtaining a sample from the subject; (b) determining if the subject is susceptible to treatment with an agent capable of inhibiting or reversing EMT or a chemotherapeutic agent using a predictive method defined in accordance with the above described first and second aspects of this facet of the disclosure; and, (c) administering to the subject a therapeutically effective amount of an agent capable of inhibiting or reversing EMT or a chemotherapeutic agent.

[0648] In some embodiments the method comprises administering a therapeutically effective amount of an agent capable of inhibiting or reversing EMT or chemotherapeutic agent to a subject identified as susceptible to said treatment using a predictive method defined in accordance with the above described first and second aspects of this facet of the disclosure.

[0649] In other embodiments the method comprises: (a) administering to a subject a therapeutically effective amount of an agent capable of inhibiting or reversing EMT or a chemotherapeutic agent; and, (b) determining if the subject is susceptible to said treatment using a predictive method defined in accordance with the above described second aspect of this facet of the disclosure. In some embodiments the method further comprises: (c) administering to the subject one or more further therapeutically effective amounts of an agent capable of inhibiting or reversing EMT or a chemotherapeutic agent provided that the subject is identified as susceptible to said treatment.

[0650] A ninth aspect of this facet of the present disclosure relates to an agent capable of inhibiting or reversing EMT or chemotherapeutic agent for use in a method of treating a subject having, suspected of having, or diagnosed with myelodysplastic syndrome (MDS). In some embodiments the method of treatment is a method as defined above.

[0651] A tenth aspect of this facet of the present disclosure relates to use of an agent capable of inhibiting or reversing EMT or chemotherapeutic agent for use in a method of manufacture of a medicament for use in a method of treating a subject having, suspected of having, or diagnosed with myelodysplastic syndrome (MDS). In some embodiments the method of treatment is a method as defined above.

[0652] In some embodiments of these methods, agents for use, or uses, the agent capable of inhibiting or reversing EMT or chemotherapeutic agent comprises an Axl inhibitor, Akt3 inhibitor, Slfn11 inhibitor, or PHGDH inhibitor. In some preferred embodiments the agent capable of inhibiting or reversing EMT or chemotherapeutic agent is an Axl inhibitor, for example BGB324/R428/bemcentinib, cabozantinib, TP-0903, foretinib, merestinib, bosutinib, gilteritinib, crizotinib, amuvatinib, sunitinib, sitravatinib, LDC1267, or UNC2025. Other Axl inhibitors include the anti-Axl antibodies described in WO2015/193428, WO2015/193430, WO2016/097370, and WO2016/166296. In some preferred embodiments the Axl inhibitor is an anti-Axl antibody described in WO2015/193428, WO2015/193430, WO2016/097370, or WO2016/166296. In some particularly preferred embodiments the Axl inhibitor is BGB324/R428/bemcentinib.

[0653] In some other preferred embodiments, the treatment comprises an Akt3 inhibitor. In some embodiments the Akt3 inhibitor is an Akt3 inhibitor disclosed in WO2016/102672.

[0654] In some embodiments of these methods, agents for use, or uses, the treatment is administered as a single agent. In other embodiments, the treatment is administered in combination with a further cancer treatment. Suitable further cancer treatments are outlined in detail above. In some embodiments the further cancer treatment is a pyrimidine analogue, for example azacitidine, capecitabine, cytarabine, edatrexate, floxuridine, fluorouracil, gemcitabine, or troxacitabine, or a cytidine analogue, for example decitabine. In some particularly preferred embodiments the further cancer treatment is cytarabine. In other particularly preferred embodiments the further cancer treatment is decitabine.

[0655] Statements of Disclosure

[0656] The following numbered statements relate to aspects of this facet of the present disclosure, and form part of the description:
[0657] 101. A method of predicting a cancer-related outcome in a subject, the method comprising assessing the activity, expression, or amount of one or more biomarker in the subject, or in a sample derived from the subject;
   [0658] wherein the one or more biomarker is selected from the group consisting of: Axl, TFR1, FAS, IL-8, THP, TRAIL-R3, MDC, ALP, TFF3, FABP, vWF, VDBP, Cystatin-B, Uteroglobin, Fibrinogen, EGFR, and/or Leptin; and
   [0659] wherein the subject has, is suspected of having, or has been diagnosed with myelodysplastic syndrome (MDS).
[0660] 102. A method according to statement 101, wherein the method comprises:
   [0661] assessing the activity, expression, or amount of one or more biomarker in the subject, or in a sample derived from the subject, to obtain a sample profile of the one or more biomarker; and
   [0662] making a prediction based on the sample profile of the one or more biomarker.
[0663] 103. A method according to statement 102, wherein the prediction is made by comparing the sample profile to a control profile.
[0664] 104. A method according to statement 103, wherein the sample profile is obtained before the subject is contacted with or administered an agent capable of inhibiting or reversing EMT or a chemotherapeutic agent.
[0665] 105. A method according to statement 104, wherein the control profile is:
   [0666] (i) obtained from a population of control subjects having MDS; or
   [0667] (ii) obtained from a control subject or population of control subjects having MDS and previously found to lack susceptibility to treatment with an agent capable of inhibiting or reversing EMT or a chemotherapeutic agent (that is, non-responder subjects);
   [0668] (iii) a predetermined profile of biomarker expression, activity, or amount values, for example a profile of “average, median, or mean” values or “standard ranges” of values, obtained from a control subject or population of control subjects having MDS and previously found to lack susceptibility to treatment with an agent capable of inhibiting or reversing EMT or a chemotherapeutic agent (that is, non-responder subjects);
   [0669] (iv) obtained from a control sample having a known “average, median, or mean” value of biomarkers indicative of a control subject or population of control subjects having MDS and previously found to lack susceptibility to treatment with an agent capable of inhibiting or reversing EMT or a chemotherapeutic agent (that is, non-responder subjects);
   [0670] (v) a predetermined profile of biomarker expression, activity, or amount “threshold” values obtained from a control subject or population of control subjects having MDS and previously found to be susceptible to treatment with an agent capable of inhibiting or reversing EMT or a chemotherapeutic agent (that is, responder subjects); or
   [0671] (vi) obtained from a control sample having a known “threshold” value of biomarkers indicative of a control subject or population of control subjects having MDS and previously found to be susceptible to treatment with an agent capable of inhibiting or reversing EMT or a chemotherapeutic agent (that is, responder subjects).
[0672] 106. A method according to statement 105, wherein a higher activity, expression, or amount of one or more biomarker in the sample profile as compared with the control profile is indicative of susceptibility to treatment with an agent capable of inhibiting or reversing EMT or a chemotherapeutic agent.
[0673] 107. A method according to statement 105, wherein a lower activity, expression, or amount of one or more biomarker in the sample profile as compared with the control profile is indicative of susceptibility to treatment with an agent capable of inhibiting or reversing EMT or a chemotherapeutic agent.
[0674] 108. A method according to any one of statements 105-107, wherein the one or more biomarker includes at least one of: THP, TRAIL-R3, MDC, ALP, TFF3, FABP, vWF, VDBP, Cystatin-B, Uteroglobin, Fibrinogen, EGFR, and/or Leptin,
   [0675] and wherein a higher activity, expression, or amount of one or more of said biomarkers in the sample profile as compared with the control profile is indicative of susceptibility to treatment with an agent capable of inhibiting or reversing EMT or a chemotherapeutic agent.
[0676] 109. A method according to any one of statements 105-108, wherein the one or more biomarker includes at least one of: Axl, TFR1, FAS, and/or IL-8,
   [0677] and wherein a lower activity, expression, or amount of one or more of said biomarkers in the sample profile as compared with the control profile is indicative of susceptibility to treatment with an agent capable of inhibiting or reversing EMT or a chemotherapeutic agent.
[0678] 110. A method according to any one of statements 105-109, wherein:
   [0679] a lower activity, expression, or amount of Axl; and/or
   [0680] a lower activity, expression, or amount of TFR1; and/or
   [0681] a lower activity, expression, or amount of FAS; and/or
   [0682] a lower activity, expression, or amount of IL-8; and/or
   [0683] a higher activity, expression, or amount of THP; and/or
   [0684] a higher activity, expression, or amount of TRAIL-R3; and/or
   [0685] a higher activity, expression, or amount of MDC; and/or
   [0686] a higher activity, expression, or amount of ALP; and/or
   [0687] a higher activity, expression, or amount of TFF3; and/or
   [0688] a higher activity, expression, or amount of FABP; and/or
   [0689] a higher activity, expression, or amount of vWF; and/or
   [0690] a higher activity, expression, or amount of VDBP; and/or
   [0691] a higher activity, expression, or amount of Cystatin-B; and/or
   [0692] a higher activity, expression, or amount of Uteroglobin; and/or
   [0693] a higher activity, expression, or amount of Fibrinogen; and/or
   [0694] a higher activity, expression, or amount of EGFR; and/or
   [0695] a higher activity, expression, or amount of Leptin;
   [0696] in the sample profile as compared with the control profile is indicative of susceptibility to treatment with an agent capable of inhibiting or reversing EMT or a chemotherapeutic agent.
[0697] 111. A method according to any one of statements 101-110, wherein the one or more biomarker comprises Axl,
   [0698] optionally wherein the one or more biomarker comprises Axl and at least 1, 2, 3, 4, 5, 6, 7, 8, 9, 10, or more further biomarkers selected from: TFR1, FAS, IL-8, THP, TRAIL-R3, MDC, ALP, TFF3, FABP, vWF, VDBP, Cystatin-B, Uteroglobin, Fibrinogen, EGFR, and/or Leptin.
[0699] 112. A method according to any one of statements 101-111, wherein:
   [0700] said Axl biomarker comprises an amino acid sequence having at least 70%, 80%, 90%, 95%, 99% or 100% sequence identity with the full-length of the amino acid sequence disclosed at UniProt accession no: P30530-1 or P30530-2 (entry version 196) or a fragment thereof;
   [0701] said Transferrin receptor protein 1 (TFR1) biomarker comprises an amino acid sequence having at least 70%, 80%, 90%, 95%, 99% or 100% sequence identity with the full-length of the amino acid sequence disclosed at UniProt accession no: P02786 (entry version 222) or a fragment thereof;
   [0702] said FASLG Receptor (FAS) biomarker comprises an amino acid sequence having at least 70%, 80%, 90%, 95%, 99% or 100% sequence identity with the full-length of the amino acid sequence disclosed at UniProt accession no: P25445-1, P25445-2, P25445-3, P25445-4, P25445-5, P25445-6, or P25445-7 (entry version 227) or a fragment thereof;
   [0703] said Interleukin-8 (IL-8) biomarker comprises an amino acid sequence having at least 70%, 80%, 90%, 95%, 99% or 100% sequence identity with the full-length of the amino acid sequence disclosed at UniProt accession no: P10145 (entry version 210) or a fragment thereof;
   [0704] said Tamm-Horsfall Urinary Glycoprotein (THP) biomarker comprises an amino acid sequence having at least 70%, 80%, 90%, 95%, 99% or 100% sequence identity with the full-length of the amino acid sequence disclosed at UniProt accession no: P07911-1, P07911-2, P07911-3, P07911-4, or P07911-5 (entry version 182) or a fragment thereof;
   [0705] said TNF-Related Apoptosis-Inducing Ligand Receptor 3 (TRAIL-R3) biomarker comprises an amino acid sequence having at least 70%, 80%, 90%, 95%, 99% or 100% sequence identity with the full-length of the amino acid sequence disclosed at UniProt accession no: 014798 (entry version 152) or a fragment thereof;
   [0706] said Macrophage-Derived Chemokine (MDC) biomarker comprises an amino acid sequence having at least 70%, 80%, 90%, 95%, 99% or 100% sequence identity with the full-length of the amino acid sequence disclosed at UniProt accession no: 000626 (entry version 153) or a fragment thereof;
   [0707] said Antileukoproteinase (ALP) biomarker comprises an amino acid sequence having at least 70%, 80%, 90%, 95%, 99% or 100% sequence identity with the full-length of the amino acid sequence disclosed at UniProt accession no: P03973 (entry version 184) or a fragment thereof;
   [0708] said Trefoil Factor 3 (TFF3) biomarker comprises an amino acid sequence having at least 70%, 80%, 90%, 95%, 99% or 100% sequence identity with the full-length of the amino acid sequence disclosed at UniProt accession no: Q07654 (entry version 161) or a fragment thereof;
   [0709] said Fatty Acid-Binding Protein, adipocyte (FABP) biomarker comprises an amino acid sequence having at least 70%, 80%, 90%, 95%, 99% or 100% sequence identity with the full-length of the amino acid sequence disclosed at UniProt accession no: P15090 (entry version 183) or a fragment thereof;
   [0710] said von Willebrand Factor (vWF) biomarker comprises an amino acid sequence having at least 70%, 80%, 90%, 95%, 99% or 100% sequence identity with the full-length of the amino acid sequence disclosed at UniProt accession no: P04275-1 or P04275-2 (entry version 233) or a fragment thereof;
   [0711] said Vitamin D-Binding Protein (VDBP) biomarker comprises an amino acid sequence having at least 70%, 80%, 90%, 95%, 99% or 100% sequence identity with the full-length of the amino acid sequence disclosed at UniProt accession no: P02774-1, P02774-2, or P02774-3 (entry version 201) or a fragment thereof;
   [0712] said Cystatin-B biomarker comprises an amino acid sequence having at least 70%, 80%, 90%, 95%, 99% or 100% sequence identity with the full-length of the amino acid sequence disclosed at UniProt accession no: P04080 (entry version 201) or a fragment thereof;
   [0713] said Uteroglobin biomarker comprises an amino acid sequence having at least 70%, 80%, 90%, 95%, 99% or 100% sequence identity with the full-length of the amino acid sequence disclosed at UniProt accession no: P11684 (entry version 163) or a fragment thereof;
   [0714] said Fibrinogen biomarker comprises an amino acid sequence having at least 70%, 80%, 90%, 95%, 99% or 100% sequence identity with the full-length of the amino acid sequence disclosed at UniProt accession no: P02671-1 or P02671-2 (entry version 227) or a fragment thereof;
   [0715] said Epidermal Growth Factor Receptor (EGFR) biomarker comprises an amino acid sequence having at least 70%, 80%, 90%, 95%, 99% or 100% sequence identity with the full-length of the amino acid sequence disclosed at UniProt accession no: Q504U8 (entry version 138) or a fragment thereof; and/or
   [0716] said Leptin biomarker comprises an amino acid sequence having at least 70%, 80%, 90%, 95%, 99% or 100% sequence identity with the full-length of the amino acid sequence disclosed at UniProt accession no: P41159 (entry version 176) or a fragment thereof;
   [0717] or a nucleic acid (either DNA or RNA) having at least 70%, 80%, 90%, 95%, 99% or 100% sequence identity with the full-length nucleic acid sequence encoding said amino acid sequences.
[0718] 113. A method according to any one of statement 101-112, wherein the method comprises determining the amount of at least 2, 3, 4, 5, 6, 7, 8, 9, 10, 11, 12, 13, 14, 15, 20 of said biomarkers in the subject, or sample derived from the subject.
[0719] 114. A method according to any one of statements 104-113, wherein assessing the activity, expression, or amount of one or more biomarker in the subject, or in a sample derived from the subject, comprises:
   [0720] contacting a sample, or an extract from the sample, with at least 1, 2, 3, 4, 5, 6, 7, 8, 9, 10 or more reagents for detecting the activity, expression, or amount of one or more biomarkers, each of which is selective for a particular biomarker; and
   [0721] detecting and/or quantifying said reagents for detecting.
[0722] 115. A method according to statement 114, wherein assessing the expression or amount of one or more biomarker in the subject, or in a sample derived from the subject, comprises:
   [0723] contacting a sample, or an extract from the sample, with at least 1, 2, 3, 4, 5, 6, 7, 8, 9, 10 or more specific binding members, each of which selectively binds to a respective biomarker protein or mRNA; and
   [0724] detecting and/or quantifying formation of complex formed by said specific binding member and said biomarker protein or mRNA.
[0725] 116. A method according to statement 115 wherein the specific binding member comprises an antibody molecule or binding fragment thereof.
[0726] 117. A method according to statement 115 or 116, wherein detecting formation of a complex formed by the specific binding member and the biomarker protein or mRNA is carried out by use of a technique selected from: Western blot; enzyme-linked immunosorbent assay (ELISA); radioimmunoassay (RIA); competitive enzyme immunoassay; double antibody sandwich ELISA (DAS-ELISA); liquid immunoarray technology; immunocytochemistry; immunohistochemistry; antibody microarray detection; precipitation of colloidal gold; affinity chromatography; ligand binding assay; and lectin binding assay.
[0727] 118. A method according to any one of statements 115-117 wherein the expression or amount of the one or more biomarker is determined as the absolute amount of the respective biomarker protein or mRNA in the sample.
[0728] 119. A method according to any one of statements 115-117 wherein the expression or amount of the one or more biomarker is determined as a relative amount of the respective biomarker protein or mRNA in the sample,
   [0729] optionally wherein the relative amount is determined relative to a reference protein or mRNA in the sample, the expression of which is not altered by MDS.
[0730] 120. A method according to any one of statements 101-119, wherein the cancer-related outcome is susceptibility to treatment with an agent capable of inhibiting or reversing EMT or a chemotherapeutic agent.
[0731] 121. A method according to statement 120, wherein the agent capable of inhibiting or reversing EMT or chemotherapeutic agent is an Axl inhibitor, Akt3 inhibitor, Slfn11 inhibitor, or PHGDH inhibitor.
[0732] 122. A method according to statement 121, wherein the agent capable of inhibiting or reversing EMT or chemotherapeutic agent is an Axl inhibitor.
[0733] 123. A method according to statement 122, wherein the Axl inhibitor is BGB324/R428/bemcentinib, cabozantinib, TP-0903, foretinib, merestinib, bosutinib, gilteritinib, crizotinib, amuvatinib, sunitinib, sitravatinib, LDC1267, UNC2025, or an anti-Axl antibody described in WO2015/193428, WO2015/193430, WO2016/097370, or WO2016/166296.
[0734] 124. A method according to statement 123, wherein the Axl inhibitor is BGB324/R428/bemcentinib.
[0735] 125. A method according to statement 123, wherein the Axl inhibitor is an anti-Axl antibody described in WO2015/193428, WO2015/193430, WO2016/097370, or WO2016/166296.
[0736] 126. A method according to statement 121, wherein the agent capable of inhibiting or reversing EMT or chemotherapeutic agent is an Akt3 inhibitor.
[0737] 127. A method according to statement 126, wherein the Akt3 inhibitor is an Akt3 inhibitor disclosed in WO2016/102672.
[0738] 128. A method according to any one of statements 120-127, wherein the agent capable of inhibiting or reversing EMT is administered as a single agent.
[0739] 129. A method according to any one of statements 120-127, wherein the agent capable of inhibiting or reversing EMT is administered in combination with a further cancer treatment.
[0740] 130. A method according to statement 129, wherein the further cancer treatment is selected from:
   [0741] (i) alkylating agents, including alkyl sulfonates such as busulfan;
   [0742] (ii) nitrogen mustards such as chlorambucil, cyclophosphamide, estramustine, ifosfamide, mechlorethamine, melphalan, and uramustine;
   [0743] (iii) ethyleneimine derivatives such as thiotepa;
   [0744] (iv) nitrosoureas such as carmustine, lomustine, and streptozocin;
   [0745] (v) triazenes such as dacarbazine, procarbazine, and temozolamide;
   [0746] (vi) platinum compounds such as cisplatin, carboplatin, oxaliplatin, satraplatin, and picoplatin onnaplatin, tetraplatin, sprioplatin, iproplatin, chloro(diethylenediamino)-platinum (II) chloride, dichloro(ethylenediamino)-platinum (II), diamino(2-ethylmalonato)platinum (II), (1,2-diaminocyclohexane)malonatoplatinum (II), (4-carboxyphthalo)-(1,2-diaminocyclohexane)platinum (II), (1,2-diaminocyclohexane)-(isocitrato)platinum (II), and (1,2-diaminocyclohexane)-cis-(pyruvato)platinum (II);
   [0747] (vii) antimetabolites, including antifolates such as methotrexate, permetrexed, raltitrexed, and trimetrexate;
   [0748] (viii) pyrimidine analogues such as azacitidine, capecitabine, cytarabine, edatrexate, floxuridine, fluorouracil, gemcitabine, and troxacitabine;
   [0749] (ix) purine analogues such as cladribine, chlorodeoxyadenosine, clofarabine, fludarabine, mercaptopurine, pentostatin, and thioguanine;
   [0750] (x) natural products, including antitumor antibiotics such as bleomycin, dactinomycin, mithramycin, mitomycin, mitoxantrone, porfiromycin;
   [0751] (xi) anthracyclines such as daunorubicin, doxorubicin, epirubicin, idarubicin, and valrubicin;
   [0752] (xii) mitotic inhibitors such as the vinca alkaloids vinblastine, vinvesir, vincristine, vindesine, and vinorelbine;
   [0753] (xiii) enzymes such as L-asparaginase and PEG-L-asparaginase;
   [0754] (xiv) microtubule polymer stabilizers such as the taxanes paclitaxel and docetaxel;
   [0755] (xv) topoisomerase I inhibitors such as the camptothecins irinotecan and topotecan;
   [0756] (xvi) topoisomerase II inhibitors such as podophyllotoxin, amsacrine, etoposide, teniposide, losoxantrone and actinomycin;
   [0757] (xvii) hormones and hormone antagonists, including
      [0758] androgens such as fluoxymesterone and testolactone;
      [0759] antiandrogens such as bicalutamide, cyproterone, flutamide, and nilutamide;
      [0760] corticosteroids such as dexamethasone and prednisone;
      [0761] aromatase inhibitors such as aminoglutethimide, anastrozole, exemestane, formestane, and letrozole;
      [0762] estrogens such as diethylstilbestrol;
      [0763] antiestrogens such as fulvestrant, raloxifene, tamoxifen, and toremifine;
      [0764] luteinising hormone-releasing hormone (LHRH) agonists and antagonists such as abarelix, buserelin, goserelin, leuprolide, histrelin, desorelin, nafarelin acetate and triptorelin;
      [0765] progestins such as medroxyprogesterone acetate and megestrol acetate; and
      [0766] thyroid hormones such as levothyroxine and liothyronine;
   [0767] (xviii) PKB pathway inhibitors, including perifosine, enzastaurin hydrochloride, and triciribine;
   [0768] (xix) P13K inhibitors such as semaphore and SF1126, and MTOR inhibitors such as rapamycin and analogues;
   [0769] (xx) CDK inhibitors, including seliciclib, alvocidib, and 7-hydroxystaurosporine;
   [0770] (xxi) COX-2 inhibitors, including celecoxib;
   [0771] (xxii) HDAC inhibitiors, including trichostatin A, suberoylanilide hydroxamic acid, and chlamydocin;
   [0772] (xxiii) DNA methylase inhibitors, including temozolomide, and miscellaneous agents, including altretamine, arsenic trioxide, thalidomide, lenalidomide, gallium nitrate, levamisole, mitotane, hydroxyurea, octreotide, procarbazine, suramin, photodynamic compounds such as methoxsalen and sodium porfimer;
   [0773] (xxiv) proteasome inhibitors such as bortezomib;
   [0774] (xxv) molecular targeted therapy agents including: functional therapeutic agents, including gene therapy agents and antisense therapy agents;
   [0775] (xxvi) tyrosine kinase inhibitors such as erlotinib hydrochloride, gefitinib, imatinib mesylate, and semaxanib;
   [0776] (xxvii) Raf inhibitors such as sorafenib, and gene expression modulators such as the retinoids and rexinoids, for example adapalene, bexarotene, trans-retinoic acid, 9-cis-retinoic acid, and N-(4-hydroxyphenyl)retinamide;
   [0777] (xxviii) phenotype-directed therapy agents, including monoclonal antibodies such as pembrolizumab, alemtuzumab, bevacizumab, cetuximab, ibritumomab tiuxetan, rituximab, and trastuzumab, immunotoxins such as gemtuzumab ozogamicin, radioimmunoconjugates such as I-tositumobab;
   [0778] (xxix) cancer vaccines;
   [0779] (xxx) biologic therapy agents including: interferons such as interferon-[alpha]2a and interferon-[alpha]2b, and interleukins such as aldesleukin, denileukin diftitox, and oprelvekin;
   [0780] (xxxi) anticancer therapies involving the use of protective or adjunctive agents, including: cytoprotective agents such as amifostine, and dexrazoxane, phosphonates such as pamidronate and zoledronic acid, and stimulating factors such as epoetin, darbeopetin, filgrastim, PEG-filgrastim, and sargramostim;
   [0781] (xxxii) Axl inhibitors such as 1-(6,7-dihydro-5H-benzo[6,7]cyclohepta[1,2-c]pyridazin-3-yl)-N3-((7-(S)-pyrrolidin-1-yl)-6,7,8,9-tetrahydro-5H-benzo[7]annulene-2-yl)-1H-1,2,4-triazole-3,5-diamine; and/or
   [0782] (xxxiii) further combination chemotherapeutic regimens, such as combinations of carboplatin/paclitaxel, capecitabine/docetaxel, fluorauracil/levamisole, fluorauracil/leucovorin, methotrexate/leucovorin, and trastuzumab/paclitaxel, alone or in further combination with carboplatin.
[0783] 131. A method according to statement 129, wherein the further cancer treatment is a pyrimidine analogue, for example azacitidine, capecitabine, cytarabine, edatrexate, floxuridine, fluorouracil, gemcitabine, or troxacitabine, or a cytidine analogue, for example decitabine.
[0784] 132. A method according to statement 131, wherein the further cancer treatment is cytarabine.
[0785] 133. A method according to statement 131, wherein the further cancer treatment is decitabine.
[0786] 134. A method according to any one of statements 101-133, wherein the subject is mammalian.
[0787] 135. A method according to statement 134, wherein the subject is human.
[0788] 136. A method according to any one of statements 101-135, wherein the predictive method is performed before the subject receives a treatment or course of treatment for MDS.
[0789] 137. A method according to any one of statement 101-136, wherein the predictive method is performed during or after a treatment or course of treatment for MDS.
[0790] 138. A method according to any one of statements 101-135 or 137, wherein the subject has previously been treated with an agent capable of inhibiting or reversing EMT or a chemotherapeutic agent.
[0791] 139. A method according to statement 138, wherein the subject has previously been treated with an agent selected from: a PHGDH inhibitor, a Slfn11 inhibitor, an Axl inhibitor, or an Akt3 inhibitor.
[0792] 140. A method according to any one of statements 138-139, wherein the subject has previously been treated with an agent that is different to the agent capable of inhibiting or reversing EMT or chemotherapeutic agent for which the subject's susceptibility is being predicted.
[0793] 141. A method according to any one of statements 101-136, wherein the subject has not previously been treated with an agent capable of inhibiting or reversing EMT or a chemotherapeutic agent.
[0794] 142. A method according to statement 141, wherein the subject has not previously been treated with an Axl inhibitor.
[0795] 143. A method according to statement 141, wherein the subject has not previously been treated with an Akt3 inhibitor.
[0796] 144. A method according to any one of statements 101-143, wherein the sample is selected from: blood, serum, plasma, tissue biopsy, culture supernatant, or urine.
[0797] 145. A method according to statement 144, wherein the sample is a blood, serum, or plasma sample.
[0798] 146. A method according to statement 145, wherein the sample is a serum sample.
[0799] 147. A method according to any one of statements 104-146, wherein the method further comprises a subsequent step of assessing the activity, expression, or amount of one or more biomarker in the subject, in which a sample profile is obtained after contacting the subject with an agent capable of inhibiting or reversing EMT or a chemotherapeutic agent.
[0800] 148. A method according to statement 103, wherein the sample profile is obtained after contacting the subject with an agent capable of inhibiting or reversing EMT or a chemotherapeutic agent.
[0801] 149. A method according to statement 147 or 148, wherein the control profile is obtained from the same subject prior to contacting said subject with the agent capable of inhibiting or reversing EMT or a chemotherapeutic agent.
[0802] 150. A method according to statement 149, wherein an increase in the activity, expression, or amount of one or more biomarker in the sample profile as compared with the control profile is indicative of higher susceptibility to treatment with an agent capable of inhibiting or reversing EMT or a chemotherapeutic agent.
[0803] 151. A method according to statement 149, wherein a decrease in the activity, expression, or amount of one or more biomarker in the sample profile as compared with the control profile is indicative of higher susceptibility to treatment with an agent capable of inhibiting or reversing EMT or a chemotherapeutic agent.
[0804] 152. A method according to statement 149, wherein an increase in the activity, expression, or amount of one or more biomarker in the sample profile as compared with the control profile is indicative of lower susceptibility to treatment with an agent capable of inhibiting or reversing EMT or a chemotherapeutic agent.
[0805] 153. A method according to statement 149, wherein a decrease in the activity, expression, or amount of one or more biomarker in the sample profile as compared with the control profile is indicative of lower susceptibility to treatment with an agent capable of inhibiting or reversing EMT or a chemotherapeutic agent.
[0806] 154. A method according to statement 150, wherein the one or more biomarker includes at least Axl.
[0807] 155. A method according to any one of statements 147-154, wherein assessing the activity, expression, or amount of one or more biomarker in the subject, or in a sample derived from the subject, comprises:
   [0808] contacting a sample, or an extract from the sample, with at least 1, 2, 3, 4, 5, 6, 7, 8, 9, 10 or more reagents for detecting the activity, expression, or amount of one or more biomarkers, each of which is selective for a particular biomarker; and
   [0809] detecting and/or quantifying said reagents for detecting.
[0810] 156. A method according to statement 155, wherein assessing the expression or amount of one or more biomarker in the subject, or in a sample derived from the subject, comprises:
   [0811] contacting a sample, or an extract from the sample, with at least 1, 2, 3, 4, 5, 6, 7, 8, 9, 10 or more specific binding members, each of which selectively binds to a respective biomarker protein or mRNA; and
   [0812] detecting and/or quantifying formation of a complex formed by said specific binding member and said biomarker protein or mRNA.
[0813] 157. A method according to statement 156, wherein the specific binding member comprises an antibody molecule or binding fragment thereof.
[0814] 158. A method according to statement 156 or 157, wherein detecting formation of a complex formed by the specific binding member and the biomarker protein or mRNA is carried out by use of a technique selected from: Western blot; enzyme-linked immunosorbent assay (ELISA); radioimmunoassay (RIA); competitive enzyme immunoassay; double antibody sandwich ELISA (DAS-ELISA); liquid immunoarray technology; immunocytochemistry; immunohistochemistry; antibody microarray detection; precipitation of colloidal gold; affinity chromatography; ligand binding assay; and lectin binding assay.
[0815] 159. A method according to any one of statements 156-158 wherein the expression or amount of the one or more biomarker is determined as the absolute amount of the respective biomarker protein or mRNA in the sample.
[0816] 160. A method according to any one of statements 156-158 wherein the expression or amount of the one or more biomarker is determined as a relative amount of the respective biomarker protein or mRNA in the sample,
   [0817] optionally wherein the relative amount is determined relative to a reference protein or mRNA in the sample, the expression of which is not altered by MDS.
[0818] 161. A method according to any one of statements 148-160, wherein the agent capable of inhibiting or reversing EMT or chemotherapeutic agent is an Axl inhibitor, Akt3 inhibitor, Slfn11 inhibitor, or PHGDH inhibitor.
[0819] 162. A method according to statement 161, wherein the agent capable of inhibiting or reversing EMT or chemotherapeutic agent is an Axl inhibitor.
[0820] 163. A method according to statement 162, wherein the Axl inhibitor is BGB324/R428/bemcentinib, cabozantinib, TP-0903, foretinib, merestinib, bosutinib, gilteritinib, crizotinib, amuvatinib, sunitinib, sitravatinib, LDC1267, UNC2025, or an anti-Axl antibody described in WO2015/193428, WO2015/193430, WO2016/097370, or WO2016/166296.
[0821] 164. A method according to statement 163, wherein the Axl inhibitor is BGB324/R428/bemcentinib.
[0822] 165. A method according to statement 163, wherein the Axl inhibitor is an anti-Axl antibody described in WO2015/193428, WO2015/193430, WO2016/097370, or WO2016/166296.
[0823] 166. A method according to statement 161, wherein the agent capable of inhibiting or reversing EMT or chemotherapeutic agent is an Akt3 inhibitor.
[0824] 167. A method according to statement 166, wherein the Akt3 inhibitor is an Akt3 inhibitor disclosed in WO2016/102672.
[0825] 168. A method according to any one of statements 161-167, wherein the agent capable of inhibiting or reversing EMT is administered as a single agent.
[0826] 169. A method according to any one of statements 161-167, wherein the agent capable of inhibiting or reversing EMT is administered in combination with a further cancer treatment.
[0827] 170. A method according to statement 169, wherein the further cancer treatment is selected from the further cancer treatments listed in statement 130.
[0828] 171. A method according to statement 169, wherein the further cancer treatment is a pyrimidine analogue, for example azacitidine, capecitabine, cytarabine, edatrexate, floxuridine, fluorouracil, gemcitabine, or troxacitabine, or a cytidine analogue, for example decitabine.
[0829] 172. A method according to statement 171, wherein the further cancer treatment is cytarabine. 173. A method according to statement 171, wherein the further cancer treatment is decitabine.
[0830] 174. A method according to any one of statements 148-173, wherein the subject is mammalian.
[0831] 175. A method according to statement 174, wherein the subject is human.
[0832] 176. A method according to any one of statements 148-175, wherein the subject was selected for treatment with the agent capable of inhibiting or reversing EMT or a chemotherapeutic agent, using a predictive method according to any one of statements 101-147.
[0833] 177. A method according to any one of statements 148-176, wherein the sample is selected from: blood, serum, plasma, tissue biopsy, culture supernatant, or urine.
[0834] 178. A method according to statement 177, wherein the sample is a blood, serum, or plasma sample.
[0835] 179. A method according to statement 178, wherein the sample is a serum sample.
[0836] 180. A method according to any one of statements 1-179, wherein the method is performed in vitro or ex vivo.
[0837] 201. A method of selecting subjects having, suspected of having, or diagnosed with myelodysplastic syndrome (MDS) for treatment with an agent capable of inhibiting or reversing EMT or a chemotherapeutic agent, the method comprising:
   [0838] identifying subjects susceptible to treatment with an agent capable of inhibiting or reversing EMT or a chemotherapeutic agent using a method according to any one of statements 101-180; and
   [0839] selecting thus identified subjects for treatment.
[0840] 202. A method of selecting subjects having, suspected of having, or diagnosed with myelodysplastic syndrome (MDS) for continued treatment with an agent capable of inhibiting or reversing EMT or a chemotherapeutic agent, the method comprising:
   [0841] identifying subjects susceptible to treatment with an agent capable of inhibiting or reversing EMT or a chemotherapeutic agent using a method according to any one of statements 148-180; and
   [0842] selecting thus identified subjects for treatment.
[0843] 203. A method according to any one of statements 201-202, wherein treatment comprises administering to the subject a therapeutically effective amount of an agent capable of inhibiting or reversing EMT or a chemotherapeutic agent.
[0844] 204. A method according to statement 203, wherein the treatment comprises an Axl inhibitor, Akt3 inhibitor, Slfn11 inhibitor, or PHGDH inhibitor.
[0845] 205. A method according to statement 204, wherein the treatment comprises an Axl inhibitor.
[0846] 206. A method according to statement 205, wherein the Axl inhibitor is BGB324/R428/bemcentinib, cabozantinib, TP-0903, foretinib, merestinib, bosutinib, gilteritinib, crizotinib, amuvatinib, sunitinib, sitravatinib, LDC1267, UNC2025, or an anti-Axl antibody described in WO2015/193428, WO2015/193430, WO2016/097370, or WO2016/166296.
[0847] 207. A method according to statement 206, wherein the Axl inhibitor is BGB324/R428/bemcentinib.
[0848] 208. A method according to statement 206, wherein the Axl inhibitor is an anti-Axl antibody described in WO2015/193428, WO2015/193430, WO2016/097370, or WO2016/166296.
[0849] 209. A method according to statement 204, wherein the treatment comprises an Akt3 inhibitor.
[0850] 210. A method according to statement 209, wherein the Akt3 inhibitor is an Akt3 inhibitor disclosed in WO2016/102672.
[0851] 211. A method according to any one of statements 203-210, wherein the treatment is administered as a single agent.
[0852] 212. A method according to any one of statements 203-211, wherein the treatment is administered in combination with a further cancer treatment.
[0853] 213. A method according to statement 212, wherein the further cancer treatment is selected from the further cancer treatments listed in statement 130.
[0854] 214. A method according to statement 212, wherein the further cancer treatment is a pyrimidine analogue, for example azacitidine, capecitabine, cytarabine, edatrexate, floxuridine, fluorouracil, gemcitabine, or troxacitabine, or a cytidine analogue, for example decitabine.
[0855] 215. A method according to statement 214, wherein the further cancer treatment is cytarabine.
[0856] 216. A method according to statement 214, wherein the further cancer treatment is decitabine.
[0857] 301. A diagnostic kit comprising 1, 2, 3, 4, 5, 6, 7, 8, 9, 10 or more reagents for detecting the activity, expression, or amount of one or more biomarkers, each of which is selective for a particular biomarker selected from the group consisting of: Axl, TFR1, FAS, IL-8, THP, TRAIL-R3, MDC, ALP, TFF3, FABP, vWF, VDBP, Cystatin-B, Uteroglobin, Fibrinogen, EGFR, and/or Leptin.
[0858] 302. A test device comprising 1, 2, 3, 4, 5, 6, 7, 8, 9, 10 or more reagents for detecting the activity, expression, or amount of one or more biomarkers, each of which is selective for a particular biomarker selected from the group consisting of: Axl, TFR1, FAS, IL-8, THP, TRAIL-R3, MDC, ALP, TFF3, FABP, vWF, VDBP, Cystatin-B, Uteroglobin, Fibrinogen, EGFR, and/or Leptin.
[0859] 303. A diagnostic kit or test device according to any one of statements 301 or 302, comprising:
   [0860] 1, 2, 3, 4, 5, 6, 7, 8, 9, 10 or more specific binding members, each of which selectively binds to a biomarker selected from the group consisting of: Axl, TFR1, FAS, IL-8, THP, TRAIL-R3, MDC, ALP, TFF3, FABP, vWF, VDBP, Cystatin-B, Uteroglobin, Fibrinogen, EGFR, and/or Leptin; and
   [0861] one or more reagents for detecting said one or more specific binding members or one or more reagents for detecting and/or quantifying formation of a complex formed by said specific binding member and said biomarker.
[0862] 304. A diagnostic kit or test device according to statement 303, wherein the specific binding member comprises an antibody molecule or binding fragment thereof.
[0863] 305. A diagnostic kit or test device according to statement 303 or 304, wherein detecting formation of a complex formed by the specific binding member and the biomarker is carried out by use of a technique selected from: Western blot; enzyme-linked immunosorbent assay (ELISA); radioimmunoassay (RIA); competitive enzyme immunoassay; double antibody sandwich ELISA (DAS-ELISA); liquid immunoarray technology; immunocytochemistry; immunohistochemistry; antibody microarray detection; precipitation of colloidal gold; affinity chromatography; ligand binding assay; and lectin binding assay.
[0864] 306. A diagnostic kit or test device according to any one of statements 301-305, wherein the kit or test device comprises no more than 15, 20, 25, 30, 40, or 50 reagents for detecting.
[0865] 307. A diagnostic kit or test device according to any one of statements 301-306 for use in a method of predicting a cancer-related outcome in a subject.
[0866] 308. A diagnostic kit for use, or test device for use, according to statement 307, wherein the cancer-related outcome is susceptibility to treatment with an agent capable of inhibiting or reversing EMT or a chemotherapeutic agent.
[0867] 309. A diagnostic kit for use, or test device for use, according to statement 308, wherein the agent capable of inhibiting or reversing EMT or chemotherapeutic agent is an Axl inhibitor, Akt3 inhibitor, Slfn11 inhibitor, or PHGDH inhibitor.
[0868] 310. A diagnostic kit for use, or test device for use, according to statement 308, wherein the agent capable of inhibiting or reversing EMT or chemotherapeutic agent is an Axl inhibitor.
[0869] 311. A diagnostic kit for use, or test device for use, according to statement 310, wherein the Axl inhibitor is BGB324/R428/bemcentinib, cabozantinib, TP-0903, foretinib, merestinib, bosutinib, gilteritinib, crizotinib, amuvatinib, sunitinib, sitravatinib, LDC1267, UNC2025, or an anti-Axl antibody described in WO2015/193428, WO2015/193430, WO2016/097370, or WO2016/166296.
[0870] 312. A diagnostic kit for use, or test device for use, according to statement 311, wherein the Axl inhibitor is BGB324/R428/bemcentinib.
[0871] 313. A diagnostic kit for use, or test device for use, according to statement 311, wherein the Axl inhibitor is an anti-Axl antibody described in WO2015/193428, WO2015/193430, WO2016/097370, or WO2016/166296.
[0872] 314. A diagnostic kit for use, or test device for use, according to statement 308, wherein the agent capable of inhibiting or reversing EMT or chemotherapeutic agent is an Akt3 inhibitor.
[0873] 315. A diagnostic kit for use, or test device for use, according to any one of statements 307-310, wherein the subject has, is suspected of having, or has been diagnosed with myelodysplastic syndrome (MDS).
[0874] 316. A diagnostic kit for use, or test device for use, according to any one of statements 307-315, wherein the method is a method according to any one of statements 101-180.
[0875] 317. Use of a reagent for detecting the activity, expression, or amount of a biomarker selected from the group consisting of: Axl, TFR1, FAS, IL-8, THP, TRAIL-R3, MDC, ALP, TFF3, FABP, vWF, VDBP, Cystatin-B, Uteroglobin, Fibrinogen, EGFR, and/or Leptin, in a method of predicting a cancer-related outcome in a subject.
[0876] 318. Use of 1, 2, 3, 4, 5, 6, 7, 8, 9, 10 or more reagents for detecting the activity, expression, or amount a biomarker, each of which is selective for a particular biomarker selected from the group consisting of: Axl, TFR1, FAS, IL-8, THP, TRAIL-R3, MDC, ALP, TFF3, FABP, vWF, VDBP, Cystatin-B, Uteroglobin, Fibrinogen, EGFR, and/or Leptin, in a method of manufacture of a diagnostic kit or test device for use in a method of predicting a cancer-related outcome in a subject.
[0877] 319. A use according to statement 317 or 318, wherein the reagent for detecting comprises a specific binding member selective for a particular biomarker.
[0878] 320. A use according to statement 317 or 318, wherein the method of predicting a cancer-related outcome in a subject is a method according to any one of statements 101-180.
[0879] 401. Use of one or more of: Axl, TFR1, FAS, IL-8, THP, TRAIL-R3, MDC, ALP, TFF3, FABP, vWF, VDBP, Cystatin-B, Uteroglobin, Fibrinogen, EGFR, and/or Leptin, as a biomarker for determining if a subject is susceptible to treatment with an agent capable of inhibiting or reversing EMT or a chemotherapeutic agent.
[0880] 402. A use according to statement 401, wherein:
   [0881] (i) a higher activity, expression, or amount of one or more of said biomarkers in the subject, or sample derived from the subject, compared with a control profile for the respective biomarker is indicative of susceptibility to treatment with an agent capable of inhibiting or reversing EMT or a chemotherapeutic agent; or
   [0882] (ii) a lower activity, expression, or amount of one or more of said biomarkers in the subject, or sample derived from the subject, compared with a control profile for the respective biomarker is indicative of susceptibility to treatment with an agent capable of inhibiting or reversing EMT or a chemotherapeutic agent.
[0883] 403. A use according to statement 401, wherein:
   [0884] (i) an increase in the activity, expression, or amount of one or more biomarker relative to a control profile for the respective biomarker after contacting the subject with a cancer therapeutic agent is indicative of increased susceptibility to treatment with an agent capable of inhibiting or reversing EMT or a chemotherapeutic agent; or
   [0885] (ii) a decrease in the activity, expression, or amount of one or more biomarker relative to a control profile for the respective biomarker after contacting the subject with a cancer therapeutic agent is indicative of increased susceptibility to treatment with an agent capable of inhibiting or reversing EMT or a chemotherapeutic agent.
[0886] 404. A use according to any one of statements 401-403, wherein the use is as a biomarker in a method according to any one of statements 101-180
[0887] 501. A method of treating a subject having, suspected of having, or diagnosed with myelodysplastic syndrome (MDS), the method comprising:
   [0888] identifying a subject susceptible to treatment using a method according to any one of statements 101-180; and
   [0889] administering to the subject a therapeutically effective amount of an agent capable of inhibiting or reversing EMT or a chemotherapeutic agent.
[0890] 502. A method of treating a subject having, suspected of having, or diagnosed with myelodysplastic syndrome (MDS), the method comprising:
   [0891] (a) obtaining a sample from the subject;
   [0892] (b) determining if the subject is susceptible to treatment with an agent capable of inhibiting or reversing EMT or a chemotherapeutic agent using a method according to any one of statements 101-180;
   [0893] (c) administering to the subject a therapeutically effective amount of an agent capable of inhibiting or reversing EMT or a chemotherapeutic agent.
[0894] 503. A method of treating a subject having, suspected of having, or diagnosed with myelodysplastic syndrome (MDS), the method comprising administering a therapeutically effective amount of an agent capable of inhibiting or reversing EMT or chemotherapeutic agent to a subject identified as susceptible to said treatment using a method according to any one of statements 101-180.
[0895] 504. A method of treating a subject having, suspected of having, or diagnosed with myelodysplastic syndrome (MDS), the method comprising:
   [0896] administering to the subject a therapeutically effective amount of an agent capable of inhibiting or reversing EMT or a chemotherapeutic agent; and
   [0897] determining if the subject is susceptible to said treatment using a method according to any one of statements 148-180.
[0898] 505. A method according to statement 504, wherein the method comprises administering to the subject one or more further therapeutically effective amounts of an agent capable of inhibiting or reversing EMT or a chemotherapeutic agent provided that the subject is identified as susceptible to said treatment.
[0899] 506. An agent capable of inhibiting or reversing EMT or chemotherapeutic agent for use in a method of treating a subject having, suspected of having, or diagnosed with myelodysplastic syndrome (MDS),
   [0900] wherein the method is a method according to any one of statements 501-505.
[0901] 507. Use of an agent capable of inhibiting or reversing EMT or chemotherapeutic agent for use in a method of manufacture of a medicament for use in a method of treating a subject having, suspected of having, or diagnosed with myelodysplastic syndrome (MDS),
   [0902] wherein the method of treatment is a method according to any one of statements 501-505.
[0903] 508. A method, agent for use, or use according to any one of statements 501-507, wherein the agent capable of inhibiting or reversing EMT or chemotherapeutic agent comprises an Axl inhibitor, Akt3 inhibitor, Slfn11 inhibitor, or PHGDH inhibitor.
[0904] 509. A method, agent for use, or use according to statement 508, wherein the agent capable of inhibiting or reversing EMT or chemotherapeutic agent comprises an Axl inhibitor.
[0905] 510. A method, agent for use, or use according to statement 509, wherein the Axl inhibitor is BGB324/R428/bemcentinib, cabozantinib, TP-0903, foretinib, merestinib, bosutinib, gilteritinib, crizotinib, amuvatinib, sunitinib, sitravatinib, LDC1267, UNC2025, or an anti-Axl antibody described in WO2015/193428, WO2015/193430, WO2016/097370, or WO2016/166296.
[0906] 511. A method, agent for use, or use according to statement 510, wherein the Axl inhibitor is BGB324/R428/bemcentinib.
[0907] 512. A method, agent for use, or use according to statement 510, wherein the Axl inhibitor is an anti-Axl antibody described in WO2015/193428, WO2015/193430, WO2016/097370, or WO2016/166296.
[0908] 512. A method, agent for use, or use according to statement 508, wherein the agent capable of inhibiting or reversing EMT or chemotherapeutic agent comprises an Akt3 inhibitor.
[0909] 513. A method, agent for use, or use according to statement 512, wherein the Akt3 inhibitor is an Akt3 inhibitor disclosed in WO2016/102672.
[0910] 514. A method, agent for use, or use according to any one of statements 501-513, wherein the agent capable of inhibiting or reversing EMT or chemotherapeutic agent is administered as a single agent.
[0911] 515. A method, agent for use, or use according to any one of statements 501-513, wherein the agent capable of inhibiting or reversing EMT or chemotherapeutic agent is administered in combination with a further cancer treatment.
[0912] 516. A method, agent for use, or use according to statement 515, wherein the further cancer treatment is selected from the further cancer treatments listed in statement 130.
[0913] 517. A method, agent for use, or use according to statement 515, wherein the further cancer treatment is a pyrimidine analogue, for example azacitidine, capecitabine, cytarabine, edatrexate, floxuridine, fluorouracil, gemcitabine, or troxacitabine, or a cytidine analogue, for example decitabine.
[0914] 518. A method, agent for use, or use according to statement 517, wherein the further cancer treatment is cytarabine.
[0915] 519. A method, agent for use, or use according to statement 517, wherein the further cancer treatment is decitabine.

[0916] Facet 3: Acute Myelocytic Leukemia (AML) & Myelodysplastic Syndrome (MDS)

[0917] Biomarkers

[0918] The term “marker” or “biomarker” is used herein to refer to a gene or protein whose expression in a subject or sample derived from a subject is altered or modulated, for example, up or down regulated, in cancer. Where the biomarker is a protein, modulation or alteration of expression encompasses modulation through different post-translational modifications.

[0919] In accordance with any aspect of this facet of the present disclosure the biomarkers described herein may be defined as follows, wherein:
[0920] an Axl biomarker comprises an amino acid sequence having at least 70%, 80%, 90%, 95%, 99% or 100% sequence identity with the full-length of the amino acid sequence disclosed at UniProt accession no: P30530-1 or P30530-2 (entry version 196) or a fragment thereof;
[0921] a Fibroblast Growth Factor 21 (FGF-21) biomarker comprises an amino acid sequence having at least 70%, 80%, 90%, 95%, 99% or 100% sequence identity with the full-length of the amino acid sequence disclosed at UniProt accession no: Q9NSA1 (entry version 145) or a fragment thereof;
[0922] a Matrix Metalloproteinase-10 (MMP-10) biomarker comprises an amino acid sequence having at least 70%, 80%, 90%, 95%, 99% or 100% sequence identity with the full-length of the amino acid sequence disclosed at UniProt accession no: P09238 (entry version 185) or a fragment thereof;
[0923] a Transferrin receptor protein 1 (TFR1) biomarker comprises an amino acid sequence having at least 70%, 80%, 90%, 95%, 99% or 100% sequence identity with the full-length of the amino acid sequence disclosed at UniProt accession no: P02786 (entry version 222) or a fragment thereof;
[0924] a Tamm-Horsfall Urinary Glycoprotein (THP) biomarker comprises an amino acid sequence having at least 70%, 80%, 90%, 95%, 99% or 100% sequence identity with the full-length of the amino acid sequence disclosed at UniProt accession no: P07911-1, P07911-2, P07911-3, P07911-4, or P07911-5 (entry version 182) or a fragment thereof;
[0925] a Hemopexin biomarker comprises an amino acid sequence having at least 70%, 80%, 90%, 95%, 99% or 100% sequence identity with the full-length of the amino acid sequence disclosed at UniProt accession no: P02790 (entry version 179) or a fragment thereof;
[0926] a Haptoglobin biomarker comprises an amino acid sequence having at least 70%, 80%, 90%, 95%, 99% or 100% sequence identity with the full-length of the amino acid sequence disclosed at UniProt accession no: P00738-1 or P00738-2 (entry version 200) or a fragment thereof; and/or
[0927] an Immunoglobulin M (IgM) biomarker comprises an amino acid sequence having at least 70%, 80%, 90%, 95%, 99% or 100% sequence identity with the full-length of the amino acid sequence disclosed at UniProt accession no: P01871-1 or P01871-2 (entry version 180) or a fragment thereof.

[0928] The biomarkers described herein may also be defined as a nucleic acid (either DNA or RNA) having at least 70%, 80%, 90%, 95%, 99% or 100% sequence identity with the full-length nucleic acid sequence encoding any of the above amino acid sequences.

[0929] Identity may be as defined using sequence comparisons made using FASTA and FASTP (see Pearson & Lipman, 1988. Methods in Enzymology 183: 63-98). Parameters are preferably set, using the default matrix, as follows: Gapopen (penalty for the first residue in a gap): −12 for proteins/-16 for DNA; Gapext (penalty for additional residues in a gap): −2 for proteins/-4 for DNA; KTUP word length: 2 for proteins/6 for DNA.

[0930] Pre-Treatment Predictive Biomarkers and Methods

[0931] By analysing patient data obtained from clinical trial BGBC003 (NCT02488408), the authors have discovered that, prior to treatment of subjects having AML or MDS, certain of the biomarkers described herein are present in the serum of “responder” subjects at higher levels than in the serum of “non-responder” subjects—see Example 1. Similarly, prior to treatment of the subject certain of the biomarkers described herein are present in the serum of “responder” subjects at lower levels than in the serum of “non-responder” subjects. Thus, by assessing the activity, expression, or amount of one or more of the biomarkers described herein prior to treatment with an agent capable of inhibiting or reversing EMT or a chemotherapeutic agent it is possible to determine the likelihood of that subject being susceptible or responsive to treatment with said agent.

[0932] Accordingly, in a first aspect of this facet, the disclosure provides a method of predicting a cancer-related outcome in a subject having, suspected of having, or diagnosed with acute myelocytic leukemia (AML) or myelodysplastic syndrome (MDS), the method comprising assessing the activity, expression, or amount of one or more of the biomarkers described herein in the subject, or in a sample derived from the subject.

[0933] In some embodiments the one or more biomarker is selected from the group consisting of: Axl, Fibroblast Growth Factor 21 (FGF-21), Matrix Metalloproteinase-10 (MMP-10), Transferrin receptor protein 1 (TFR1), Tamm-Horsfall Urinary Glycoprotein (THP), Hemopexin, Haptoglobin, and/or Immunoglobulin M (IgM).

[0934] A “cancer-related outcome” as described herein is a clinical prediction or prognosis associated with cancer. In some embodiments the cancer-related outcome is susceptibility to treatment with an agent capable of inhibiting or reversing EMT or a chemotherapeutic agent.

[0935] In some embodiments the method comprises assessing the activity, expression, or amount of one or more of the biomarkers described herein in the subject, or in a sample derived from the subject, to obtain a sample profile of the one or more biomarker; and, making a prediction based on the sample profile of the one or more biomarker.

[0936] A “sample profile” as used herein is a profile of numerical values or numerical ranges corresponding to the activity, expression, or amount of respective biomarkers determined in the subject or sample derived from the subject.

[0937] In some embodiments of the method the prediction is made by comparing the sample profile to a control profile. A “control profile” as used herein is a profile of numerical values or numerical ranges corresponding to the activity, expression, or amount of the same biomarkers as for the sample profile, determined in a control subject or population of control subjects. Suitable control profiles are described in more detail below.

[0938] Prior to treatment of a subject, certain of the biomarkers described herein have been found to exhibit up-regulated expression in “responder” subjects—that is, certain of the biomarkers described herein have been found to be present in the serum of “responder” subjects at higher levels than in the serum of “non-responder” subjects. Similarly, prior to treatment of a subject, certain of the biomarkers described herein have been found to exhibit down-regulated expression in “responder” subjects—that is, certain of the biomarkers described herein have been found to be present in the serum of “responder” subjects at lower levels than in the serum of “non-responder” subjects.

[0939] This difference in expression level between “responder” and “non-responder” subjects can also be expressed in the opposite way. That is to say, prior to treatment of a subject, certain of the biomarkers described herein have been found to exhibit down-regulated expression in “non-responder” subjects—that is, certain of the biomarkers described herein have been found to be present in the serum of “non-responder” subjects at lower levels than in the serum of “responder” subjects. Similarly, prior to treatment of a subject, certain of the biomarkers described herein have been found to exhibit up-regulated expression in “non-responder” subjects—that is, certain of the biomarkers described herein have been found to be present in the serum of “non-responder” subjects at higher levels than in the serum of “responder” subjects.

[0940] The discovery of these differential patterns of expression mean that, by assessing the activity, expression, or amount of one or more of the biomarkers described herein prior to treatment of a subject with an agent, it is possible to determine the likelihood of that subject being susceptible or responsive to treatment with said agent. Accordingly, in particularly preferred embodiments the sample profile is obtained before the subject is contacted with or administered the agent capable of inhibiting or reversing EMT or a chemotherapeutic agent.

[0941] A subject who is “susceptible to treatment” with an agent capable of inhibiting or reversing EMT or a chemotherapeutic agent is one who is likely to, or who does, respond to treatment (or benefit from treatment) with an agent capable of inhibiting or reversing EMT or a chemotherapeutic agent. That is, a subject who is “susceptible to treatment” with an agent is a “responder” subject for that agent, as defined above. A prediction that is “indicative of susceptibility” is one which suggests or points towards the likelihood that a subject will respond to or benefit from treatment.

[0942] In some embodiments the predictive methods of the disclosure comprise assessing the activity, expression, or amount of one or more of the biomarkers described herein in the subject, or in a sample derived from the subject, to obtain a sample profile of the one or more biomarker; and, making a prediction based on the sample profile of the one or more biomarker. In some embodiments of the method the prediction is made by comparing the sample profile to a control profile, wherein the control profile is a profile of numerical values or numerical ranges corresponding to the activity, expression, or amount of the same biomarkers as for the sample profile, determined in a control subject or population of control subjects.

[0943] In some embodiments the control profile may be obtained from a population of control subjects having AML or MDS. In some embodiments the control profile may be obtained from a population of control subjects not having AML or MDS. In other embodiments the control profile may be obtained from a control subject or population of control subjects having AML or MDS and previously found to lack susceptibility to treatment with an agent capable of inhibiting or reversing EMT or a chemotherapeutic agent (that is, non-responder subjects).

[0944] In some embodiments the control profile may a predetermined profile of biomarker expression, activity, or amount values, for example a profile of “mean” values, “threshold” values, or “standard ranges” of values. This predetermined profile of biomarker expression, activity, or amount values can be obtained, for example, from a control subject or population of control subjects having AML or MDS, a control subject or population of control subjects not having AML or MDS, or a control subject or population of control subjects having AML or MDS and previously found to lack susceptibility to treatment with an agent capable of inhibiting or reversing EMT or a chemotherapeutic agent (that is, non-responder subjects).

[0945] In some other embodiments the control profile may be obtained from a control subject or population of control subjects having AML or MDS and previously found to be susceptible to treatment with an agent capable of inhibiting or reversing EMT or a chemotherapeutic agent (that is, responder subjects). In some embodiments the control profile may a predetermined profile of biomarker expression, activity, or amount values, for example a profile of “threshold”, values or “standard ranges” of values. This predetermined profile of biomarker expression, activity, or amount values can be obtained, for example, from a control subject or population of control subjects having AML or MDS and previously found to be susceptible to treatment with an agent capable of inhibiting or reversing EMT or a chemotherapeutic agent (that is, responder subjects).

[0946] In some other embodiments the control profile may be obtained from a control sample having a known amount (for example a “threshold” amount) of the same biomarkers as will be determined in the sample profile. This threshold amount can be obtained, for example, from non-responder or responder subjects as outlined above.

[0947] The skilled person is readily able to determine suitable “mean”, “threshold”, or “standard range” values for a particular biomarker.

[0948] For example, a “mean” value may be determined by: assessing the activity, expression, or amount of a particular biomarker in a population of subjects having (or not having) AML or MDS; and, averaging the biomarker activity, expression, or amount determined to determine a “mean” value.

[0949] For example, a “mean” value may be determined by: assessing the activity, expression, or amount of a particular biomarker in a population of subjects; determining which subjects in the population are susceptible to treatment with an agent capable of inhibiting or reversing EMT or a chemotherapeutic agent; and, averaging the biomarker activity, expression, or amount determined in subjects found to be susceptible to treatment with an agent capable of inhibiting or reversing EMT or a chemotherapeutic agent (that is, responder subjects) to determine a “mean” value.

[0950] For example, a “threshold” value may be determined by: assessing the activity, expression, or amount of a particular biomarker in a population of subjects; determining which subjects in the population are susceptible to treatment with an agent capable of inhibiting or reversing EMT or a chemotherapeutic agent; and, selecting as appropriate the highest or lowest biomarker activity, expression, or amount determined in a subject found to be susceptible to treatment with an agent capable of inhibiting or reversing EMT or a chemotherapeutic agent (that is, a responder subject) as the “threshold value”.

[0951] For example, a “standard range” of values may be determined by: assessing the activity, expression, or amount of a particular biomarker in a population of subjects having (or not having) AML or MDS; and, determining a “standard range” of values based on this assessment.

[0952] For example, a “standard range” of values may be determined by: assessing the activity, expression, or amount of a particular biomarker in a population of subjects; determining which subjects in the population are susceptible to treatment with an agent capable of inhibiting or reversing EMT or a chemotherapeutic agent; and, determining a “standard range” of values for subjects found to be susceptible to treatment with an agent capable of inhibiting or reversing EMT or a chemotherapeutic agent (that is, a responder subject) based on this assessment.

[0953] Where the control profile is a predetermined profile of biomarker expression, activity, or amount values, this may be provided as a “look-up table” or data record. Predetermined control profiles of this type may be a profile of numerical values or numerical ranges corresponding to a measure of central tendency (such as an average, median or mean) amount of the respective biomarkers determined in a plurality of control subjects (for example non-responder or responder subjects as outlined above). The skilled person is readily able to determine both a measure of central tendency and a measure of variability within a population using standard protein quantification techniques and suitable statistical tools.

[0954] Accordingly, in embodiments in which the control profile is: obtained from a population of control subjects having AML or MDS; obtained from a population of control subjects not having AML or MDS; obtained from a control subject or population of control subjects having AML or MDS and previously found to lack susceptibility to treatment with an agent capable of inhibiting or reversing EMT or a chemotherapeutic agent (that is non-responder subjects); a predetermined profile of biomarker expression, activity, or amount values (for example a profile of “average, median, or mean” values or “standard ranges” of values) obtained from non-responder subjects; obtained from a control sample having a known “average, median, or mean” value of biomarkers indicative of non-responder subjects; a predetermined profile of biomarker expression, activity, or amount “threshold” values obtained from responder subjects; or, obtained from a control sample having a known “threshold” value of biomarkers indicative of responder subjects; then, a higher activity, expression, or amount of one or more of the biomarkers described herein in a sample profile as compared with the control profile may be indicative of susceptibility to treatment with an agent capable of inhibiting or reversing EMT or a chemotherapeutic agent. Similarly, a lower activity, expression, or amount of one or more of the biomarkers described herein in the sample profile as compared with a control profile may be indicative of susceptibility to treatment with an agent capable of inhibiting or reversing EMT or a chemotherapeutic agent.

[0955] In some such embodiments, the method may comprise assessing the activity, expression, or amount of one or more of biomarker selected from: THP, Hemopexin, Haptoglobin, and/or IgM; wherein a higher activity, expression, or amount of one or more of said biomarkers in the sample profile as compared with the control profile is indicative of susceptibility to treatment with an agent capable of inhibiting or reversing EMT or a chemotherapeutic agent.

[0956] In some such embodiments, the method may comprise assessing the activity, expression, or amount of one or more of biomarker selected from: Axl, FGF-21, MMP-10, and/or TFR1; wherein a lower activity, expression, or amount of one or more of said biomarkers in the sample profile as compared with the control profile is indicative of susceptibility to treatment with an agent capable of inhibiting or reversing EMT or a chemotherapeutic agent.

[0957] In some such embodiments: a lower activity, expression, or amount of Axl; and/or a lower activity, expression, or amount of FGF-21; and/or a lower activity, expression, or amount of MMP-10; and/or a lower activity, expression, or amount of TFR1; and/or a higher activity, expression, or amount of THP; and/or a higher activity, expression, or amount of Hemopexin; and/or a higher activity, expression, or amount of Haptoglobin; and/or a higher activity, expression, or amount of IgM; in the sample profile as compared with the control profile is indicative of susceptibility to treatment with an agent capable of inhibiting or reversing EMT or a chemotherapeutic agent.

[0958] In embodiments in which the control profile is: obtained from a control subject or population of control subjects having AML or MDS and previously found to be susceptible to treatment with an agent capable of inhibiting or reversing EMT or a chemotherapeutic agent (that is, responder subjects); then, if the expression, activity, or amount values in the sample profile are above a “threshold” value typical of a responder subject (that is, a subject having AML or MDS and previously found to be susceptible to treatment with an agent capable of inhibiting or reversing EMT or a chemotherapeutic agent) this is indicative of susceptibility to treatment with an agent capable of inhibiting or reversing EMT or a chemotherapeutic agent. Similarly, if the expression, activity, or amount values in the sample profile are below the “threshold” value typical of a responder subject (that is, a subject having AML or MDS and previously found to be susceptible to treatment with an agent capable of inhibiting or reversing EMT or a chemotherapeutic agent) this is indicative of a lack of susceptibility to treatment with an agent capable of inhibiting or reversing EMT or a chemotherapeutic agent.

[0959] In embodiments in which the control profile is: a predetermined profile of “standard ranges” of biomarker expression, activity, or amount values obtained from responder subjects; then, if the expression, activity, or amount values in the sample profile are within the “standard range” of values typical of a responder subject (that is, a subject having AML or MDS and previously found to be susceptible to treatment with an agent capable of inhibiting or reversing EMT or a chemotherapeutic agent) this is indicative of susceptibility to treatment with an agent capable of inhibiting or reversing EMT or a chemotherapeutic agent. Similarly, if the expression, activity, or amount values in the sample profile are outside the “standard range” of values typical of a responder subject (that is, a subject having AML or MDS and previously found to be susceptible to treatment with an agent capable of inhibiting or reversing EMT or a chemotherapeutic agent) this is indicative of a lack of susceptibility to treatment with an agent capable of inhibiting or reversing EMT or a chemotherapeutic agent.

[0960] In embodiments in which the control profile is: a predetermined profile of “standard ranges” of biomarker expression, activity, or amount values obtained from non-responder subjects; then, if the expression, activity, or amount values in the sample profile are within the “standard range” of values typical of a non-responder subject (that is, a subject having AML or MDS and previously found to lack susceptibility to treatment with an agent capable of inhibiting or reversing EMT or a chemotherapeutic agent) this is indicative of a lack of susceptibility to treatment with an agent capable of inhibiting or reversing EMT or a chemotherapeutic agent. Similarly, if the expression, activity, or amount values in the sample profile are outside the “standard range” of values typical of a non-responder subject (that is, a subject having AML or MDS and previously found to lack susceptibility to treatment with an agent capable of inhibiting or reversing EMT or a chemotherapeutic agent) this may be indicative of susceptibility to treatment with an agent capable of inhibiting or reversing EMT or a chemotherapeutic agent.

[0961] In embodiments in which the control profile is: obtained from a population of control subjects not having AML or MDS; then, if the expression, activity, or amount values in the sample profile are outside a “standard range” of values typical of subjects not having AML or MDS, this is indicative of susceptibility to treatment with an agent capable of inhibiting or reversing EMT or a chemotherapeutic agent. Similarly, if the expression, activity, or amount values in the sample profile are within a “standard range” of values typical of subjects not having AML or MDS, this is indicative of a lack of susceptibility to treatment with an agent capable of inhibiting or reversing EMT or a chemotherapeutic agent. In such cases, an expression, activity or amount value may be outside the “standard range” of values when it is either above the upper limit of normal or below the lower limit of normal for a given biomarker. The upper limit of normal and lower limit of normal are the limits of the normal distribution of a given biomarker in a population of control subjects not having AML or MDS.

[0962] The skilled person is readily able to determine whether the sample profile is indicative of susceptibility or lack of susceptibility to treatment with an agent capable of inhibiting or reversing EMT or a chemotherapeutic agent using suitable statistical tools and comparison with the appropriate control.

[0963] In some embodiments the sample profile may be compared with two or more control profiles as described above.

[0964] As used herein, the term “one or more” means 1, 2, 3, 4, 5, 6, 7, 8, 9, 10, 11, 12, 13, 14, 15, 16, 17, 18, 19, or 20 of the biomarkers described herein. In some embodiments the one or more biomarker is Axl. In some embodiments the one or more biomarker is FGF-21. In some embodiments the one or more biomarker is MMP-10. In some embodiments the one or more biomarker is TFR1. In some embodiments the one or more biomarker is THP. In some embodiments the one or more biomarker is Hemopexin. In some embodiments the one or more biomarker is Haptoglobin. In some embodiments the one or more biomarker is IgM.

[0965] In some embodiments the method may comprise assessing the activity, expression, or amount of at least 2, 3, 4, 5, 6, 7, 8, 9, 10, 11, 12, 13, 14, 15, 20 of said biomarkers in the subject, or in a sample derived from the subject. In some embodiments the method may comprise assessing the activity, expression, or amount of Axl and at least 1, 2, 3, 4, 5, 6, 7, 8, 9, 10, 11, 12, 13, 14, 15, 20 further biomarkers described herein in the subject, or in a sample derived from the subject.

[0966] Subject

[0967] A “subject” as referred to herein is any species of animal classified as a mammal, and includes but is not restricted to, domestic and farm animals, primates and humans. In some preferred embodiments the subject is a human of any sex or race. In some embodiments, the human is an adult human.

[0968] In some embodiments the predictive methods described herein are performed before the subject receives a treatment or course of treatment for AML or MDS. In other embodiments the predictive method is performed during or after a treatment or course of treatment for AML or MDS. In some embodiments the treatment or course of treatment for AML or MDS is an agent capable of inhibiting or reversing EMT. In other embodiments the treatment or course of treatment for AML or MDS is a chemotherapeutic treatment that is not an agent capable of inhibiting or reversing EMT.

[0969] In some embodiments of the predictive methods described herein the subject has previously been treated with an agent capable of inhibiting or reversing EMT or a chemotherapeutic agent. In some embodiments the subject has previously been treated with an agent selected from: a PHGDH inhibitor, a Slfn11 inhibitor, an Axl inhibitor, or an Akt3 inhibitor.

[0970] In some embodiments of the predictive methods described herein the subject has previously been treated with an agent that is different to the agent capable of inhibiting or reversing EMT or chemotherapeutic agent for which the subject's response is being predicted. That is, the subject has previously been treated with an agent that is not the agent which the predictive method is determining the subject's susceptibility to. Accordingly, in some embodiments, the subject has not previously been treated with an agent capable of inhibiting or reversing EMT or a chemotherapeutic agent. In some preferred embodiments, the subject has not previously been treated with an Axl inhibitor. In other preferred embodiments, the subject has not previously been treated with an Akt3 inhibitor.

[0971] Post-Treatment Changes in Biomarkers

[0972] In some embodiments of this aspect of the disclosure, the predictive method further comprises a subsequent step of assessing the activity, expression, or amount of one or more biomarker in the subject, or in a sample derived from the subject, to obtain a second sample profile of one or more of the biomarkers described herein after the subject has received a treatment or course of treatment an agent capable of inhibiting or reversing EMT or a chemotherapeutic agent.

[0973] That is, in some embodiments, the predictive method comprises:
[0974] (a) determining if a subject is susceptible to treatment with an agent capable of inhibiting or reversing EMT or a chemotherapeutic agent by assessing the activity, expression, or amount of one or more biomarker in the subject, as outlined above;
[0975] (b) administering to the subject a therapeutically effective amount of an agent capable of inhibiting or reversing EMT or a chemotherapeutic agent; and
[0976] (c) subsequently assessing the activity, expression, or amount of one or more biomarker in the subject, or in a sample derived from the subject.

[0977] In some embodiments, the predictive method comprises:
[0978] (a) determining if a subject is susceptible to treatment with an agent capable of inhibiting or reversing EMT or a chemotherapeutic agent by assessing the activity, expression, or amount of one or more biomarker in the subject, or in a sample derived from the subject, wherein the one or more biomarker is selected from the group consisting of: Axl, FGF-21, MMP-10, TFR1, THP, Hemopexin, Haptoglobin, and/or IgM;
[0979] (b) administering to the subject a therapeutically effective amount of an agent capable of inhibiting or reversing EMT or a chemotherapeutic agent; and
[0980] (c) subsequently assessing the activity, expression, or amount of one or more biomarker in the subject, or in a sample derived from the subject.

[0981] In some preferred embodiments the methods comprise subsequently assessing the activity, expression, or amount of Axl in the subject, or in a sample derived from the subject. In some embodiments an increase in the activity, expression, or amount of Axl in the second sample profile as compared with a control profile after contacting the subject with a cancer therapeutic agent is indicative of higher susceptibility to treatment with an agent capable of inhibiting or reversing EMT or a chemotherapeutic agent. In some preferred embodiments the control profile is obtained from the same subject prior to treatment with an agent capable of inhibiting or reversing EMT or a chemotherapeutic agent.

[0982] Post-Treatment Predictive Biomarkers and Methods

[0983] By analysing patient data obtained from clinical trial BGBC003 (NCT02488408), the authors have discovered that, following treatment of subjects having AML or MDS with an agent capable of inhibiting or reversing EMT or a chemotherapeutic agent, the levels of certain of the biomarkers described herein increases in the serum of “responder” subjects but not in the serum of “non-responder” subjects—see Example 1. Similarly, following treatment with an agent capable of inhibiting or reversing EMT or a chemotherapeutic agent, the levels of certain of the biomarkers described herein decreases in the serum of “responder” subjects but not in the serum of “non-responder” subjects. Thus, by assessing the activity, expression, or amount of one or more of the biomarkers described herein prior to and following treatment with an agent capable of inhibiting or reversing EMT or a chemotherapeutic agent it is possible to determine or confirm that the subject is susceptible or responsive to treatment with said agent.

[0984] Accordingly, in a second aspect of this facet the disclosure provides a method of predicting a cancer-related outcome in a subject having, suspected of having, or diagnosed with acute myelocytic leukemia (AML) or myelodysplastic syndrome (MDS), the method comprising assessing the activity, expression, or amount of one or more of the biomarkers described herein in a subject, or in a sample derived from the subject after the subject has been contacted with an agent capable of inhibiting or reversing EMT or a chemotherapeutic agent. In some embodiments the cancer-related outcome is susceptibility to treatment with an agent capable of inhibiting or reversing EMT or a chemotherapeutic agent.

[0985] In some embodiments the method comprises assessing the activity, expression, or amount of one or more of the biomarkers described herein in the subject, or in a sample derived from the subject, to obtain a sample profile of the one or more biomarker; and, making a prediction based on the sample profile of the one or more biomarker. In some embodiments of the method the prediction is made by comparing the sample profile to a control profile. In preferred embodiments the sample profile is obtained after contacting the subject with an agent capable of inhibiting or reversing EMT or a chemotherapeutic agent.

[0986] A “control profile” as used herein is a profile of numerical values or numerical ranges corresponding to the activity, expression, or amount of the same biomarkers as for the sample profile, determined in a control subject or population of control subjects.

[0987] In preferred embodiments of this aspect of the disclosure the control profile is obtained from the same subject prior to treatment with an agent capable of inhibiting or reversing EMT or a chemotherapeutic agent. In some embodiments the control profile is obtained from a population of control subjects having AML or MDS. In other embodiments, the control profile is a predetermined profile of biomarker expression, activity, or amount values, for example a profile of “threshold” values or “standard ranges” of values.

[0988] Accordingly, in embodiments in which the control profile is obtained from the same subject prior to treatment with an agent capable of inhibiting or reversing EMT or a chemotherapeutic agent, an increase in the activity, expression, or amount of one or more biomarker in the sample profile as compared with a control profile after contacting the subject with an agent capable of inhibiting or reversing EMT or a cancer therapeutic agent may be indicative of susceptibility to treatment with an agent capable of inhibiting or reversing EMT or a chemotherapeutic agent. In such embodiments, a decrease in the activity, expression, or amount of one or more biomarker in the sample profile as compared with a control profile after contacting the subject with a cancer therapeutic agent may be indicative of higher susceptibility to treatment with an agent capable of inhibiting or reversing EMT or a chemotherapeutic agent.

[0989] In some such embodiments, an increase in the activity, expression, or amount of one or more biomarker in the sample profile as compared with a control profile after contacting the subject with a cancer therapeutic agent may be indicative of lower susceptibility to treatment with an agent capable of inhibiting or reversing EMT or a chemotherapeutic agent. In some such embodiments, a decrease in the activity, expression, or amount of one or more biomarker in the sample profile as compared with a control profile after contacting the subject with a cancer therapeutic agent may be indicative of lower susceptibility to treatment with an agent capable of inhibiting or reversing EMT or a chemotherapeutic agent.

[0990] In some preferred embodiments the one or more biomarker includes at least Axl. In some embodiments the one or more biomarker is Axl. In some embodiments an increase in the activity, expression, or amount of Axl in the sample profile as compared with a control profile after contacting the subject with a cancer therapeutic agent is indicative of higher susceptibility to treatment with an agent capable of inhibiting or reversing EMT or a chemotherapeutic agent.

[0991] Subject

[0992] A “subject” as referred to herein is any species of animal classified as a mammal, and includes but is not restricted to, domestic and farm animals, primates and humans. In some preferred embodiments the subject is a human of any sex or race. In some embodiments, the human is an adult human.

[0993] In some embodiments of this aspect of the disclosure, the subject was selected for treatment with the agent capable of inhibiting or reversing EMT or a chemotherapeutic agent, using a predictive method according to the first aspect of this facet of the disclosure outlined above.

[0994] Agents Capable of Inhibiting or Reversing EMT

[0995] The present disclosure provides methods for predicting a cancer-related outcome in a subject having, suspected of having, or diagnosed with acute myelocytic leukemia (AML) or myelodysplastic syndrome (MDS). A “cancer-related outcome” is a clinical prediction or prognosis associated with cancer.

[0996] The agents capable of inhibiting or reversing EMT for use in this AML or MDS facet of the disclosure are defined as described above in the AML facet (see identically titled section above on page 14, line 19 to page 17, line 7).

[0997] Assessing Biomarker Activity, Expression, Amount

[0998] In some embodiments of the predictive methods described herein, assessing the activity, expression, or amount of one or more biomarker in a subject, or in a sample derived from a subject, comprises: contacting a sample, or an extract from a sample, with at least 1, 2, 3, 4, 5, 6, 7, 8, 9, 10 or more reagents for detecting the activity, expression, or amount of one or more biomarkers, each of which is selective for a particular biomarker; and, detecting and/or quantifying said reagents for detecting.

[0999] In some preferred embodiments, assessing the expression or amount of the one or more biomarker comprises determining the level of the one or more biomarker protein or mRNA in the subject or sample derived from the subject. Preferably the expression or amount of the one or more biomarker is assessed by determining the level of protein expression. In particularly preferred embodiments the expression or amount of the one or more biomarker is assessed by determining the level of protein expression in serum.

[1000] The term “expression” refers to the transcription of a gene's DNA template to produce the corresponding mRNA and translation of this mRNA to produce the corresponding gene product (i.e., a peptide, polypeptide, or protein) as well as the “expression” of a protein in one or more forms that may have been modified post translation.

[1001] In some embodiments determining the level of the one or more biomarker protein or mRNA comprises: contacting a sample, or an extract from a sample, with at least 1, 2, 3, 4, 5, 6, 7, 8, 9, 10 or more specific binding members, each of which selectively binds to a respective biomarker protein or mRNA; and, detecting and/or quantifying formation of complex formed by said specific binding member and said biomarker protein or mRNA. In some embodiments the specific binding member may comprise an antibody molecule or a binding fragment thereof.

[1002] A range of suitable techniques for determining protein and mRNA expression levels are well known in the art, for example microarray analysis, Western blotting, and PCR techniques such as QPCR. In some embodiments, determining the expression or amount of the one or more biomarker protein or mRNA may comprise use of a technique selected from: Western blot; enzyme-linked immunosorbent assay (ELISA); radioimmunoassay (RIA); competitive enzyme immunoassay; double antibody sandwich ELISA (DAS-ELISA); liquid immunoarray technology; immunocytochemistry; immunohistochemistry; antibody microarray detection; precipitation of colloidal gold; affinity chromatography; ligand binding assay; and lectin binding assay.

[1003] In some embodiments, the expression or amount of the one or more biomarker is determined as an absolute amount of the respective biomarker protein or mRNA in the sample. In such cases, the respective biomarker protein or mRNA may be quantified in the sample and the amount expressed as a measure of the sample, for example the volume, mass, or total protein content of the sample.

[1004] In some embodiments, the expression or amount of the one or more biomarker is determined as a relative amount of the respective biomarker protein or mRNA in the sample, wherein the relative amount is determined relative to a reference protein or mRNA in the sample. Determining the relative amount of biomarker protein or mRNA in this way allows for normalisation to, e.g., account for differences in total protein concentration and to remove bias from sample to sample.

[1005] Preferably the reference protein or mRNA is one whose expression or amount does not vary significantly between subjects having cancer and subjects not having cancer, in particular AML or MDS. That is, the reference protein or mRNA is preferably one whose expression or amount is not altered by AML or MDS. Accordingly, the reference protein or mRNA may comprise one or more protein or mRNA which is not one of the biomarkers described herein. When expressing the expression or amount of the one or more biomarker as a relative amount, the absolute amount of the respective biomarker protein or mRNA in the sample may be divided by the absolute amount of the reference protein or mRNA in the sample.

[1006] Assessing Biomarker Expression at the RNA Level

[1007] Gene expression can be detected at the RNA level. RNA may be extracted from cells using RNA extraction techniques including, for example, using acid phenol/guanidine isothiocyanate extraction (RNAzol B; Biogenesis), RNeasy RNA preparation kits (Qiagen) or PAXgene (PreAnalytix, Switzerland). Typical assay formats utilising ribonucleic acid hybridisation include nuclear run-on assays, RT-PCR, RNase protection assays (Melton et al., Nuc. Acids Res. 12:7035), Northern blotting and In Situ hybridization. Gene expression can also be detected by microarray analysis as described below.

[1008] Assessing Biomarker Expression at the Protein Level

[1009] Preferably biomarker level is assessed by measuring protein expression. Altered gene or protein expression may also be detected by measuring the polypeptides encoded by the gene. This may be achieved by using molecules which bind to the polypeptides encoded by the biomarker gene. Suitable molecules/agents which bind either directly or indirectly to the polypeptides in order to detect the presence of the protein include naturally occurring molecules such as peptides and proteins, for example antibodies, or they may be synthetic molecules.

[1010] Antibodies may be derived from commercial sources or through techniques which are familiar to those skilled in the art. In one embodiment, and where altered expression manifests itself through the expression of alteration of post translationally-modified forms of a protein biomarker, antibodies specific for those different forms may be used. For the purposes of this disclosure, the term “antibody”, unless specified to the contrary, includes whole antibodies, or fragments of whole antibodies which retain their binding activity for a target antigen. Such fragments include Fv, F(ab′) and F(ab′)2 fragments, as well as single chain antibodies (scFv). Furthermore, the antibodies and fragments thereof may be humanised antibodies, for example as described in EP239400A. For example: monoclonal and polyclonal antibodies, recombinant antibodies, proteolytic and recombinant fragments of antibodies (Fab, Fv, scFv, diabodies), single-domain antibodies (VHH, sdAb, nanobodies, IgNAR, VNAR), and proteins unrelated to antibodies, which have been engineered to have antibody-like specific binding. Antibodies may be bound to a solid support and/or packaged into kits in a suitable container along with suitable reagents, controls, instructions and the like.

[1011] Arrays

[1012] Array technology and the various techniques and applications associated with it are well known in the art. Array technology overcomes the disadvantages with traditional methods in molecular biology, which generally work on a “one gene in one experiment” basis, resulting in low throughput and the inability to appreciate the “whole picture” of gene function. In the context of the products and methods of the present disclosure, array technology can be used, for example, in the analysis of the expression of biomarker proteins or mRNA.

[1013] In general, any library or group of samples may be arranged in an orderly manner into an array, by spatially separating the members of the library or group. Examples of suitable libraries for arraying include nucleic acid libraries (including DNA, cDNA, oligonucleotide, etc. libraries), peptide, polypeptide and protein libraries, as well as libraries comprising any molecules, such as ligand libraries, among others. Accordingly, where reference is made to a “library” in this document, unless the context dictates otherwise, such reference should be taken to include reference to a library in the form of an array.

[1014] Proteins, polypeptides, etc., may also be immobilised in arrays. For example, antibodies have been used in microarray analysis of the proteome using protein chips (Borrebaeck C A, 2000, Immunol Today 21(8):379-82). Polypeptide arrays are reviewed in, for example, MacBeath and Schreiber, 2000, Science, 289(5485):1760-1763.

[1015] Sample

[1016] Suitable samples include, but are not limited to, tissue samples such as tissue biopsy, blood, urine, buccal scrapes etc., as well as serum, plasma, or tissue culture supernatant samples. In preferred embodiments the expression or amount of the one or more biomarker is assessed by determining the level of protein expression in the sample. In some preferred embodiments the sample is a blood, serum, or plasma sample. In some particularly preferred embodiments the sample is a serum sample.

[1017] When assessing the expression or amount of the one or more biomarker proteins or mRNA in serum or plasma samples derived from a subject, samples are removed and subjected to analytical techniques such as flow cytometry, mass cytometry (CyTOF), ELISA, PET, and SELDI-TOF MS. In some embodiments, the method may comprise extracting RNA from said sample and detecting gene expression by QPCR. In some other embodiments, gene expression may be detected by detecting protein products by, for example, Western Blot.

[1018] In some embodiments, the level of expression of the one or more biomarker is assessed by determining the copy number of the gene encoding the one or more biomarker. Copy number (i.e. gene duplication events) may be determined using standard techniques known in the art, e.g. using a DNA chip as described in Jiang et al. (Jiang Q, Ho Y Y, Hao L, Nichols Berrios C, Chakravarti A. Copy number variants in candidate genes are genetic modifiers of Hirschsprung disease. PLoS One. 2011; 6(6)).

[1019] Is some preferred embodiments of the predictive methods described herein, the method is performed in vitro or ex vivo.

[1020] Methods of Selecting a Subject for Treatment

[1021] A third aspect of this facet of the present disclosure relates to methods of selecting subjects having, suspected of having, or diagnosed with acute myelocytic leukemia (AML) or myelodysplastic syndrome (MDS) for treatment with an agent capable of inhibiting or reversing EMT or a chemotherapeutic agent. In some embodiments the method comprises: identifying subjects susceptible to treatment with an agent capable of inhibiting or reversing EMT or a chemotherapeutic agent using a predictive method defined in accordance with the above described first and second aspects of this facet of the disclosure; and, selecting thus identified subjects for treatment.

[1022] In some embodiments this aspect relates to methods of selecting subjects having, suspected of having, or diagnosed with acute myelocytic leukemia (AML) or myelodysplastic syndrome (MDS) for continued treatment with an agent capable of inhibiting or reversing EMT or a chemotherapeutic agent. In some embodiments the method comprises: identifying subjects susceptible to treatment with an agent capable of inhibiting or reversing EMT or a chemotherapeutic agent using a predictive method defined in accordance with the above described second aspect of this facet of the disclosure; and, selecting thus identified subjects for treatment.

[1023] In some embodiments of this aspect of the disclosure, the treatment comprises administering to the subject a therapeutically effective amount of an agent capable of inhibiting or reversing EMT or a chemotherapeutic agent as described herein. Accordingly, in some embodiments the treatment comprises an Axl inhibitor, Akt3 inhibitor, Slfn11 inhibitor, or PHGDH inhibitor. In some preferred embodiments the treatment comprises an Axl inhibitor, for example, BGB324/R428/bemcentinib, cabozantinib, TP-0903, foretinib, merestinib, bosutinib, gilteritinib, crizotinib, amuvatinib, sunitinib, sitravatinib, LDC1267, or UNC2025. Other Axl inhibitors include the anti-Axl antibodies described in WO2015/193428, WO2015/193430, WO2016/097370, and WO2016/166296. In some preferred embodiments the Axl inhibitor is an anti-Axl antibody described in WO2015/193428, WO2015/193430, WO2016/097370, or WO2016/166296. In some particularly preferred embodiments the Axl inhibitor is BGB324/R428/bemcentinib.

[1024] In some other preferred embodiments, the treatment comprises an Akt3 inhibitor. In some embodiments the Akt3 inhibitor is an Akt3 inhibitor disclosed in WO2016/102672.

[1025] In some embodiments of this aspect of the disclosure, the treatment is administered as a single agent. In other embodiments, the treatment is administered in combination with a further cancer treatment. Suitable further cancer treatments are outlined in detail above. In some embodiments the further cancer treatment is a pyrimidine analogue, for example azacitidine, capecitabine, cytarabine, edatrexate, floxuridine, fluorouracil, gemcitabine, or troxacitabine, or a cytidine analogue, for example decitabine. In some particularly preferred embodiments the further cancer treatment is cytarabine. In other particularly preferred embodiments the further cancer treatment is decitabine.

[1026] Kits

[1027] A fourth aspect of this facet of the present disclosure relates to diagnostic kits and test devices. In some embodiments the disclosure provides a diagnostic kit comprising 1, 2, 3, 4, 5, 6, 7, 8, 9, 10 or more reagents for detecting the activity, expression, or amount of one or more of the biomarkers described herein, each of which is selective for a particular biomarker. In some embodiments each of the reagents for detecting is selective for a biomarker selected from the group consisting of: Axl, FGF-21, MMP-10, TFR1, THP, Hemopexin, Haptoglobin, and/or IgM.

[1028] In other embodiments the disclosure provides a test device comprising 1, 2, 3, 4, 5, 6, 7, 8, 9, 10 or more reagents for detecting the activity, expression, or amount of one or more of the biomarkers described herein, each of which is selective for a particular biomarker. In some embodiments each of the reagents for detecting is selective for a biomarker selected from the group consisting of: Axl, FGF-21, MMP-10, TFR1, THP, Hemopexin, Haptoglobin, and/or IgM.

[1029] In some embodiments the diagnostic kit or test device comprises 1, 2, 3, 4, 5, 6, 7, 8, 9, 10 or more specific binding members, each of which selectively binds to one of the biomarkers described herein; and, one or more reagents for detecting said one or more specific binding members, or one or more reagents for detecting and/or quantifying formation of a complex formed by said specific binding member and said biomarker. In some embodiments each specific binding member selectively binds to a biomarker selected from the group consisting of: Axl, FGF-21, MMP-10, TFR1, THP, Hemopexin, Haptoglobin, and/or IgM.

[1030] In some embodiments the diagnostic kit or test device comprises a specific binding member which selectively binds to Axl, and at least 1, 2, 3, 4, 5, 6, 7, 8, 9, 10, or more specific binding members, each of which selectively binds to a biomarker selected from the group consisting of: FGF-21, MMP-10, TFR1, THP, Hemopexin, Haptoglobin, and/or IgM.

[1031] In some embodiments of this aspect of the disclosure the diagnostic kit or test device comprises a plurality of said specific binding members provided in the form of an array on a substrate or conjugated to a plurality of particles, such as beads or microspheres. The particles may be encoded with a detectable label. In some embodiments the specific binding member comprises an antibody molecule or a binding fragment thereof.

[1032] In some embodiments of the diagnostic kit or test device detecting formation of a complex formed by a specific binding member and a biomarker is carried out by use of a technique selected from: Western blot; enzyme-linked immunosorbent assay (ELISA); radioimmunoassay (RIA); competitive enzyme immunoassay; double antibody sandwich ELISA (DAS-ELISA); liquid immunoarray technology; immunocytochemistry; immunohistochemistry; antibody microarray detection; precipitation of colloidal gold; affinity chromatography; ligand binding assay; and lectin binding assay.

[1033] In some embodiments of the diagnostic kit or test device, the kit or test device comprises no more than 15, 20, 25, 30, 40, or 50 reagents for detecting. In some embodiments of the diagnostic kit or test device, the kit or test device comprises no more than 15, 20, 25, 30, 40, or 50 specific binding members.

[1034] The present disclosure also provides use of such diagnostic kits and test devices in methods of predicting a cancer-related outcome in a subject. In preferred embodiments the cancer-related outcome is susceptibility to treatment with an agent capable of inhibiting or reversing EMT or a chemotherapeutic agent as described herein.

[1035] In some embodiments the agent capable of inhibiting or reversing EMT or chemotherapeutic agent is an Axl inhibitor, Akt3 inhibitor, Slfn11 inhibitor, or PHGDH inhibitor. In some preferred embodiments the agent capable of inhibiting or reversing EMT or chemotherapeutic agent is an Axl inhibitor, for example BGB324/R428/bemcentinib, cabozantinib, TP-0903, foretinib, merestinib, bosutinib, gilteritinib, crizotinib, amuvatinib, sunitinib, sitravatinib, LDC1267, or UNC2025. Other Axl inhibitors include the anti-Axl antibodies described in WO2015/193428, WO2015/193430, WO2016/097370, and WO2016/166296. In some preferred embodiments the Axl inhibitor is an anti-Axl antibody described in WO2015/193428, WO2015/193430, WO2016/097370, or WO2016/166296. In some particularly preferred embodiments the Axl inhibitor is BGB324/R428/bemcentinib.

[1036] In some embodiments of the diagnostic kit or test device for use in a predictive method, the subject has, is suspected of having, or has been diagnosed with AML or MDS.

[1037] In some embodiments the method may be as defined in accordance with the above described first and second aspects of this facet of the disclosure.

[1038] A fifth aspect of this facet of the present disclosure relates to the use of a reagent for detecting the activity, expression, or amount of a biomarker selected from the group consisting of: Axl, FGF-21, MMP-10, TFR1, THP, Hemopexin, Haptoglobin, and/or IgM, in a method of predicting a cancer-related outcome in a subject.

[1039] A sixth aspect of this facet of the disclosure relates to the use of 1, 2, 3, 4, 5, 6, 7, 8, 9, 10 or more reagents for detecting the activity, expression, or amount a biomarker, each of which is selective for a particular biomarker selected from the group consisting of: Axl, FGF-21, MMP-10, TFR1, THP, Hemopexin, Haptoglobin, and/or IgM, in a method of manufacture of a diagnostic kit or test device for use in a method of predicting a cancer-related outcome in a subject. In some embodiments of these uses the reagent for detecting comprises a specific binding member selective for a particular biomarker. The specific binding member may comprise an antibody molecule or a binding fragment thereof.

[1040] In some embodiments the method may be as defined in accordance with the above described first and second aspects of this facet of the disclosure.

[1041] Uses

[1042] A seventh aspect of this facet of the present disclosure relates to the use of one or more of: Axl, FGF-21, MMP-10, TFR1, THP, Hemopexin, Haptoglobin, and/or IgM, as a biomarker for determining if a subject is susceptible to treatment with an agent capable of inhibiting or reversing EMT or a chemotherapeutic agent.

[1043] In some embodiments the use relates to use of Axl, and at least 1, 2, 3, 4, 5, 6, 7, 8, 9, 10, or more of: FGF-21, MMP-10, TFR1, THP, Hemopexin, Haptoglobin, and/or IgM, as a biomarker for determining if a subject is susceptible to treatment with an agent capable of inhibiting or reversing EMT or a chemotherapeutic agent.

[1044] In some embodiments the use is as a biomarker in a method as defined in accordance with the above described first and second aspects of this facet of the disclosure.

[1045] Methods of Treating a Subject

[1046] A eighth aspect of this facet of the present disclosure relates to methods of treating a subject having, suspected of having, or diagnosed with acute myelocytic leukemia (AML) or myelodysplastic syndrome (MDS). In some embodiments the method comprises: identifying a subject for treatment using a predictive method defined in accordance with the above described first and second aspects of this facet of the disclosure; and, administering to the subject a therapeutically effective amount of an agent capable of inhibiting or reversing EMT or a chemotherapeutic agent.

[1047] Accordingly, in some embodiments, the method comprises: (a) obtaining a sample from the subject; (b) determining if the subject is susceptible to treatment with an agent capable of inhibiting or reversing EMT or a chemotherapeutic agent using a predictive method defined in accordance with the above described first and aspects of this facet of the disclosure; and, (c) administering to the subject a therapeutically effective amount of an agent capable of inhibiting or reversing EMT or a chemotherapeutic agent.

[1048] In some embodiments the method comprises administering a therapeutically effective amount of an agent capable of inhibiting or reversing EMT or chemotherapeutic agent to a subject identified as susceptible to said treatment using a predictive method defined in accordance with the above described first and second aspect of this facets of the disclosure.

[1049] In other embodiments the method comprises: (a) administering to a subject a therapeutically effective amount of an agent capable of inhibiting or reversing EMT or a chemotherapeutic agent; and, (b) determining if the subject is susceptible to said treatment using a predictive method defined in accordance with the above described second aspect of this facet of the disclosure. In some embodiments the method further comprises: (c) administering to the subject one or more further therapeutically effective amounts of an agent capable of inhibiting or reversing EMT or a chemotherapeutic agent provided that the subject is identified as susceptible to said treatment.

[1050] A ninth aspect of this facet of the present disclosure relates to an agent capable of inhibiting or reversing EMT or chemotherapeutic agent for use in a method of treating a subject having, suspected of having, or diagnosed with acute myelocytic leukemia (AML) or myelodysplastic syndrome (MDS). In some embodiments the method of treatment is a method as defined above.

[1051] A tenth aspect of this facet of the present disclosure relates to use of an agent capable of inhibiting or reversing EMT or chemotherapeutic agent for use in a method of manufacture of a medicament for use in a method of treating a subject having, suspected of having, or diagnosed with acute myelocytic leukemia (AML) or myelodysplastic syndrome (MDS). In some embodiments the method of treatment is a method as defined above.

[1052] In some embodiments of these methods, agents for use, or uses, the agent capable of inhibiting or reversing EMT or chemotherapeutic agent comprises an Axl inhibitor, Akt3 inhibitor, Slfn11 inhibitor, or PHGDH inhibitor. In some preferred embodiments the agent capable of inhibiting or reversing EMT or chemotherapeutic agent is an Axl inhibitor, for example BGB324/R428/bemcentinib, cabozantinib, TP-0903, foretinib, merestinib, bosutinib, gilteritinib, crizotinib, amuvatinib, sunitinib, sitravatinib, LDC1267, or UNC2025. Other Axl inhibitors include the anti-Axl antibodies described in WO2015/193428, WO2015/193430, WO2016/097370, and WO2016/166296. In some preferred embodiments the Axl inhibitor is an anti-Axl antibody described in WO2015/193428, WO2015/193430, WO2016/097370, or WO2016/166296. In some particularly preferred embodiments the Axl inhibitor is BGB324/R428/bemcentinib.

[1053] In some other preferred embodiments, the treatment comprises an Akt3 inhibitor. In some embodiments the Akt3 inhibitor is an Akt3 inhibitor disclosed in WO2016/102672.

[1054] In some embodiments of these methods, agents for use, or uses, the treatment is administered as a single agent. In other embodiments, the treatment is administered in combination with a further cancer treatment. Suitable further cancer treatments are outlined in detail above. In some embodiments the further cancer treatment is a pyrimidine analogue, for example azacitidine, capecitabine, cytarabine, edatrexate, floxuridine, fluorouracil, gemcitabine, or troxacitabine, or a cytidine analogue, for example decitabine. In some particularly preferred embodiments the further cancer treatment is cytarabine. In other particularly preferred embodiments the further cancer treatment is decitabine.

[1055] Statements of Disclosure

[1056] The following numbered statements relate to aspects of this facet of the present disclosure, and form part of the description:
[1057] 101. A method of predicting a cancer-related outcome in a subject, the method comprising assessing the activity, expression, or amount of one or more biomarker in the subject, or in a sample derived from the subject;
   [1058] wherein the one or more biomarker is selected from the group consisting of: Axl, FGF-21, MMP-10, TFR1, THP, Hemopexin, Haptoglobin, and/or IgM; and
   [1059] wherein the subject has, is suspected of having, or has been diagnosed with acute myelocytic leukemia (AML) or myelodysplastic syndrome (MDS).
[1060] 102. A method according to statement 101, wherein the method comprises:
   [1061] assessing the activity, expression, or amount of one or more biomarker in the subject, or in a sample derived from the subject, to obtain a sample profile of the one or more biomarker; and
   [1062] making a prediction based on the sample profile of the one or more biomarker.
[1063] 103. A method according to statement 102, wherein the prediction is made by comparing the sample profile to a control profile.
[1064] 104. A method according to statement 103, wherein the sample profile is obtained before the subject is contacted with or administered an agent capable of inhibiting or reversing EMT or a chemotherapeutic agent.
[1065] 105. A method according to statement 104, wherein the control profile is:
   [1066] (i) obtained from a population of control subjects having AML or MDS; or
   [1067] (ii) obtained from a control subject or population of control subjects having AML or MDS and previously found to lack susceptibility to treatment with an agent capable of inhibiting or reversing EMT or a chemotherapeutic agent (that is, non-responder subjects);
   [1068] (iii) a predetermined profile of biomarker expression, activity, or amount values, for example a profile of “average, median, or mean” values or “standard ranges” of values, obtained from a control subject or population of control subjects having AML or MDS and previously found to lack susceptibility to treatment with an agent capable of inhibiting or reversing EMT or a chemotherapeutic agent (that is, non-responder subjects);
   [1069] (iv) obtained from a control sample having a known “average, median, or mean” value of biomarkers indicative of a control subject or population of control subjects having AML or MDS and previously found to lack susceptibility to treatment with an agent capable of inhibiting or reversing EMT or a chemotherapeutic agent (that is, non-responder subjects);
   [1070] (v) a predetermined profile of biomarker expression, activity, or amount “threshold” values obtained from a control subject or population of control subjects having AML or MDS and previously found to be susceptible to treatment with an agent capable of inhibiting or reversing EMT or a chemotherapeutic agent (that is, responder subjects); or
   [1071] (vi) obtained from a control sample having a known “threshold” value of biomarkers indicative of a control subject or population of control subjects having AML or MDS and previously found to be susceptible to treatment with an agent capable of inhibiting or reversing EMT or a chemotherapeutic agent (that is, responder subjects).
[1072] 106. A method according to statement 105, wherein a higher activity, expression, or amount of one or more biomarker in the sample profile as compared with the control profile is indicative of susceptibility to treatment with an agent capable of inhibiting or reversing EMT or a chemotherapeutic agent.
[1073] 107. A method according to statement 105, wherein a lower activity, expression, or amount of one or more biomarker in the sample profile as compared with the control profile is indicative of susceptibility to treatment with an agent capable of inhibiting or reversing EMT or a chemotherapeutic agent.
[1074] 108. A method according to any one of statements 105-107, wherein the one or more biomarker includes at least one of: THP, Hemopexin, Haptoglobin, and/or IgM,
   [1075] and wherein a higher activity, expression, or amount of one or more of said biomarkers in the sample profile as compared with the control profile is indicative of susceptibility to treatment with an agent capable of inhibiting or reversing EMT or a chemotherapeutic agent.
[1076] 109. A method according to any one of statements 105-108, wherein the one or more biomarker includes at least one of: Axl, FGF-21, MMP-10, and/or TFR1,
   [1077] and wherein a lower activity, expression, or amount of one or more of said biomarkers in the sample profile as compared with the control profile is indicative of susceptibility to treatment with an agent capable of inhibiting or reversing EMT or a chemotherapeutic agent.
[1078] 110. A method according to any one of statements 105-109, wherein:
   [1079] a lower activity, expression, or amount of Axl; and/or
   [1080] a lower activity, expression, or amount of FGF-21; and/or
   [1081] a lower activity, expression, or amount of MMP-10; and/or
   [1082] a lower activity, expression, or amount of TFR1; and/or
   [1083] a higher activity, expression, or amount of THP; and/or
   [1084] a higher activity, expression, or amount of Hemopexin; and/or
   [1085] a higher activity, expression, or amount of Haptoglobin; and/or
   [1086] a higher activity, expression, or amount of IgM;
   [1087] in the sample profile as compared with the control profile is indicative of susceptibility to treatment with an agent capable of inhibiting or reversing EMT or a chemotherapeutic agent.
[1088] 111. A method according to any one of statements 101-110, wherein the one or more biomarker comprises Axl,
   [1089] optionally wherein the one or more biomarker comprises Axl and at least 1, 2, 3, 4, 5, 6, 7, 8, 9, 10, or more further biomarkers selected from: FGF-21, MMP-10, TFR1, THP, Hemopexin, Haptoglobin, and/or IgM.
[1090] 112. A method according to any one of statements 101-111, wherein:
   [1091] said Axl biomarker comprises an amino acid sequence having at least 70%, 80%, 90%, 95%, 99% or 100% sequence identity with the full-length of the amino acid sequence disclosed at UniProt accession no: P30530-1 or P30530-2 (entry version 196) or a fragment thereof;
   [1092] said Fibroblast Growth Factor 21 (FGF-21) biomarker comprises an amino acid sequence having at least 70%, 80%, 90%, 95%, 99% or 100% sequence identity with the full-length of the amino acid sequence disclosed at UniProt accession no: Q9NSA1 (entry version 145) or a fragment thereof;
   [1093] said Matrix Metalloproteinase-10 (MMP-10) biomarker comprises an amino acid sequence having at least 70%, 80%, 90%, 95%, 99% or 100% sequence identity with the full-length of the amino acid sequence disclosed at UniProt accession no: P09238 (entry version 185) or a fragment thereof;
   [1094] said Transferrin receptor protein 1 (TFR1) biomarker comprises an amino acid sequence having at least 70%, 80%, 90%, 95%, 99% or 100% sequence identity with the full-length of the amino acid sequence disclosed at UniProt accession no: P02786 (entry version 222) or a fragment thereof;
   [1095] said Tamm-Horsfall Urinary Glycoprotein (THP) biomarker comprises an amino acid sequence having at least 70%, 80%, 90%, 95%, 99% or 100% sequence identity with the full-length of the amino acid sequence disclosed at UniProt accession no: P07911-1, P07911-2, P07911-3, P07911-4, or P07911-5 (entry version 182) or a fragment thereof;
   [1096] said Hemopexin biomarker comprises an amino acid sequence having at least 70%, 80%, 90%, 95%, 99% or 100% sequence identity with the full-length of the amino acid sequence disclosed at UniProt accession no: P02790 (entry version 179) or a fragment thereof;
   [1097] said Haptoglobin biomarker comprises an amino acid sequence having at least 70%, 80%, 90%, 95%, 99% or 100% sequence identity with the full-length of the amino acid sequence disclosed at UniProt accession no: P00738-1 or P00738-2 (entry version 200) or a fragment thereof; and/or
   [1098] said Immunoglobulin M (IgM) biomarker comprises an amino acid sequence having at least 70%, 80%, 90%, 95%, 99% or 100% sequence identity with the full-length of the amino acid sequence disclosed at UniProt accession no: P01871-1 or P01871-2 (entry version 180) or a fragment thereof;
   [1099] or a nucleic acid (either DNA or RNA) having at least 70%, 80%, 90%, 95%, 99% or 100% sequence identity with the full-length nucleic acid sequence encoding said amino acid sequences.
[1100] 113. A method according to any one of statement 101-112, wherein the method comprises determining the amount of at least 2, 3, 4, 5, 6, 7, 8, 9, 10, 11, 12, 13, 14, 15, 20 of said biomarkers in the subject, or sample derived from the subject.
[1101] 114. A method according to any one of statements 104-113, wherein assessing the activity, expression, or amount of one or more biomarker in the subject, or in a sample derived from the subject, comprises:
   [1102] contacting a sample, or an extract from the sample, with at least 1, 2, 3, 4, 5, 6, 7, 8, 9, 10 or more reagents for detecting the activity, expression, or amount of one or more biomarkers, each of which is selective for a particular biomarker; and
   [1103] detecting and/or quantifying said reagents for detecting.
[1104] 115. A method according to statement 114, wherein assessing the expression or amount of one or more biomarker in the subject, or in a sample derived from the subject, comprises:
   [1105] contacting a sample, or an extract from the sample, with at least 1, 2, 3, 4, 5, 6, 7, 8, 9, 10 or more specific binding members, each of which selectively binds to a respective biomarker protein or mRNA; and
   [1106] detecting and/or quantifying formation of complex formed by said specific binding member and said biomarker protein or mRNA.
[1107] 116. A method according to statement 115 wherein the specific binding member comprises an antibody molecule or binding fragment thereof.
[1108] 117. A method according to statement 115 or 116, wherein detecting formation of a complex formed by the specific binding member and the biomarker protein or mRNA is carried out by use of a technique selected from: Western blot; enzyme-linked immunosorbent assay (ELISA); radioimmunoassay (RIA); competitive enzyme immunoassay; double antibody sandwich ELISA (DAS-ELISA); liquid immunoarray technology; immunocytochemistry; immunohistochemistry; antibody microarray detection; precipitation of colloidal gold; affinity chromatography; ligand binding assay; and lectin binding assay.
[1109] 118. A method according to any one of statements 115-117 wherein the expression or amount of the one or more biomarker is determined as the absolute amount of the respective biomarker protein or mRNA in the sample.
[1110] 119. A method according to any one of statements 115-117 wherein the expression or amount of the one or more biomarker is determined as a relative amount of the respective biomarker protein or mRNA in the sample,
   [1111] optionally wherein the relative amount is determined relative to a reference protein or mRNA in the sample, the expression of which is not altered by AML or MDS.
[1112] 120. A method according to any one of statements 101-119, wherein the cancer-related outcome is susceptibility to treatment with an agent capable of inhibiting or reversing EMT or a chemotherapeutic agent.
[1113] 121. A method according to statement 120, wherein the agent capable of inhibiting or reversing EMT or chemotherapeutic agent is an Axl inhibitor, Akt3 inhibitor, Slfn11 inhibitor, or PHGDH inhibitor.
[1114] 122. A method according to statement 121, wherein the agent capable of inhibiting or reversing EMT or chemotherapeutic agent is an Axl inhibitor.
[1115] 123. A method according to statement 122, wherein the Axl inhibitor is BGB324/R428/bemcentinib, cabozantinib, TP-0903, foretinib, merestinib, bosutinib, gilteritinib, crizotinib, amuvatinib, sunitinib, sitravatinib, LDC1267, UNC2025, or an anti-Axl antibody described in WO2015/193428, WO2015/193430, WO2016/097370, or WO2016/166296.
[1116] 124. A method according to statement 123, wherein the Axl inhibitor is BGB324/R428/bemcentinib.
[1117] 125. A method according to statement 123, wherein the Axl inhibitor is an anti-Axl antibody described in WO2015/193428, WO2015/193430, WO2016/097370, or WO2016/166296.
[1118] 126. A method according to statement 121, wherein the agent capable of inhibiting or reversing EMT or chemotherapeutic agent is an Akt3 inhibitor.
[1119] 127. A method according to statement 126, wherein the Akt3 inhibitor is an Akt3 inhibitor disclosed in WO2016/102672.
[1120] 128. A method according to any one of statements 120-127, wherein the agent capable of inhibiting or reversing EMT is administered as a single agent.
[1121] 129. A method according to any one of statements 120-127, wherein the agent capable of inhibiting or reversing EMT is administered in combination with a further cancer treatment.
[1122] 130. A method according to statement 129, wherein the further cancer treatment is selected from:
   [1123] (i) alkylating agents, including alkyl sulfonates such as busulfan;
   [1124] (ii) nitrogen mustards such as chlorambucil, cyclophosphamide, estramustine, ifosfamide, mechlorethamine, melphalan, and uramustine;
   [1125] (iii) ethyleneimine derivatives such as thiotepa;
   [1126] (iv) nitrosoureas such as carmustine, lomustine, and streptozocin;
   [1127] (v) triazenes such as dacarbazine, procarbazine, and temozolamide;
   [1128] (vi) platinum compounds such as cisplatin, carboplatin, oxaliplatin, satraplatin, and picoplatin onnaplatin, tetraplatin, sprioplatin, iproplatin, chloro(diethylenediamino)-platinum (II) chloride, dichloro(ethylenediamino)-platinum (II), diamino(2-ethylmalonato)platinum (II), (1,2-diaminocyclohexane)malonatoplatinum (II), (4-carboxyphthalo)-(1,2-diaminocyclohexane)platinum (II), (1,2-diaminocyclohexane)-(isocitrato)platinum (II), and (1,2-diaminocyclohexane)-cis-(pyruvato)platinum (II);
   [1129] (vii) antimetabolites, including antifolates such as methotrexate, permetrexed, raltitrexed, and trimetrexate;
   [1130] (viii) pyrimidine analogues such as azacitidine, capecitabine, cytarabine, edatrexate, floxuridine, fluorouracil, gemcitabine, and troxacitabine;
   [1131] (ix) purine analogues such as cladribine, chlorodeoxyadenosine, clofarabine, fludarabine, mercaptopurine, pentostatin, and thioguanine;
   [1132] (x) natural products, including antitumor antibiotics such as bleomycin, dactinomycin, mithramycin, mitomycin, mitoxantrone, porfiromycin;
   [1133] (xi) anthracyclines such as daunorubicin, doxorubicin, epirubicin, idarubicin, and valrubicin;
   [1134] (xii) mitotic inhibitors such as the vinca alkaloids vinblastine, vinvesir, vincristine, vindesine, and vinorelbine;
   [1135] (xiii) enzymes such as L-asparaginase and PEG-L-asparaginase;
   [1136] (xiv) microtubule polymer stabilizers such as the taxanes paclitaxel and docetaxel;
   [1137] (xv) topoisomerase I inhibitors such as the camptothecins irinotecan and topotecan;
   [1138] (xvi) topoisomerase II inhibitors such as podophyllotoxin, amsacrine, etoposide, teniposide, losoxantrone and actinomycin;
   [1139] (xvii) hormones and hormone antagonists, including
      [1140] androgens such as fluoxymesterone and testolactone;
      [1141] antiandrogens such as bicalutamide, cyproterone, flutamide, and nilutamide;
      [1142] corticosteroids such as dexamethasone and prednisone;
      [1143] aromatase inhibitors such as aminoglutethimide, anastrozole, exemestane, formestane, and letrozole;
      [1144] estrogens such as diethylstilbestrol;
      [1145] antiestrogens such as fulvestrant, raloxifene, tamoxifen, and toremifine;
      [1146] luteinising hormone-releasing hormone (LHRH) agonists and antagonists such as abarelix, buserelin, goserelin, leuprolide, histrelin, desorelin, nafarelin acetate and triptorelin;
      [1147] progestins such as medroxyprogesterone acetate and megestrol acetate; and
      [1148] thyroid hormones such as levothyroxine and liothyronine;
   [1149] (xviii) PKB pathway inhibitors, including perifosine, enzastaurin hydrochloride, and triciribine;
   [1150] (xix) P13K inhibitors such as semaphore and SF1126, and MTOR inhibitors such as rapamycin and analogues;
   [1151] (xx) CDK inhibitors, including seliciclib, alvocidib, and 7-hydroxystaurosporine;
   [1152] (xxi) COX-2 inhibitors, including celecoxib;
   [1153] (xxii) HDAC inhibitiors, including trichostatin A, suberoylanilide hydroxamic acid, and chlamydocin;
   [1154] (xxiii) DNA methylase inhibitors, including temozolomide, and miscellaneous agents, including altretamine, arsenic trioxide, thalidomide, lenalidomide, gallium nitrate, levamisole, mitotane, hydroxyurea, octreotide, procarbazine, suramin, photodynamic compounds such as methoxsalen and sodium porfimer;
   [1155] (xxiv) proteasome inhibitors such as bortezomib;
   [1156] (xxv) molecular targeted therapy agents including: functional therapeutic agents, including gene therapy agents and antisense therapy agents;
   [1157] (xxvi) tyrosine kinase inhibitors such as erlotinib hydrochloride, gefitinib, imatinib mesylate, and semaxanib;
   [1158] (xxvii) Raf inhibitors such as sorafenib, and gene expression modulators such as the retinoids and rexinoids, for example adapalene, bexarotene, trans-retinoic acid, 9-cis-retinoic acid, and N-(4-hydroxyphenyl)retinamide;
   [1159] (xxviii) phenotype-directed therapy agents, including monoclonal antibodies such as pembrolizumab, alemtuzumab, bevacizumab, cetuximab, ibritumomab tiuxetan, rituximab, and trastuzumab, immunotoxins such as gemtuzumab ozogamicin, radioimmunoconjugates such as I-tositumobab;
   [1160] (xxix) cancer vaccines;
   [1161] (xxx) biologic therapy agents including: interferons such as interferon-[alpha]2a and interferon-[alpha]2b, and interleukins such as aldesleukin, denileukin diftitox, and oprelvekin; (xxxi) anticancer therapies involving the use of protective or adjunctive agents, including: cytoprotective agents such as amifostine, and dexrazoxane, phosphonates such as pamidronate and zoledronic acid, and stimulating factors such as epoetin, darbeopetin, filgrastim, PEG-filgrastim, and sargramostim;
   [1162] (xxxii) Axl inhibitors such as 1-(6,7-dihydro-5H-benzo[6,7]cyclohepta[1,2-c]pyridazin-3-yl)-N3-((7-(S)-pyrrolidin-1-yl)-6,7,8,9-tetrahydro-5H-benzo[7]annulene-2-yl)-1H-1,2,4-triazole-3,5-diamine; and/or
   [1163] (xxxiii) further combination chemotherapeutic regimens, such as combinations of carboplatin/paclitaxel, capecitabine/docetaxel, fluorauracil/levamisole, fluorauracil/leucovorin, methotrexate/leucovorin, and trastuzumab/paclitaxel, alone or in further combination with carboplatin.
[1164] 131. A method according to statement 129, wherein the further cancer treatment is a pyrimidine analogue, for example azacitidine, capecitabine, cytarabine, edatrexate, floxuridine, fluorouracil, gemcitabine, or troxacitabine, or a cytidine analogue, for example decitabine.
[1165] 132. A method according to statement 131, wherein the further cancer treatment is cytarabine.
[1166] 133. A method according to statement 131, wherein the further cancer treatment is decitabine.
[1167] 134. A method according to any one of statements 101-133, wherein the subject is mammalian.
[1168] 135. A method according to statement 134, wherein the subject is human.
[1169] 136. A method according to any one of statements 101-135, wherein the predictive method is performed before the subject receives a treatment or course of treatment for AML or MDS.
[1170] 137. A method according to any one of statement 101-136, wherein the predictive method is performed during or after a treatment or course of treatment for AML or MDS.
[1171] 138. A method according to any one of statements 101-135 or 137, wherein the subject has previously been treated with an agent capable of inhibiting or reversing EMT or a chemotherapeutic agent.
[1172] 139. A method according to statement 138, wherein the subject has previously been treated with an agent selected from: a PHGDH inhibitor, a Slfn11 inhibitor, an Axl inhibitor, or an Akt3 inhibitor.
[1173] 140. A method according to any one of statements 138-139, wherein the subject has previously been treated with an agent that is different to the agent capable of inhibiting or reversing EMT or chemotherapeutic agent for which the subject's susceptibility is being predicted.
[1174] 141. A method according to any one of statements 101-136, wherein the subject has not previously been treated with an agent capable of inhibiting or reversing EMT or a chemotherapeutic agent.
[1175] 142. A method according to statement 141, wherein the subject has not previously been treated with an Axl inhibitor.
[1176] 143. A method according to statement 141, wherein the subject has not previously been treated with an Akt3 inhibitor.
[1177] 144. A method according to any one of statements 101-143, wherein the sample is selected from: blood, serum, plasma, tissue biopsy, culture supernatant, or urine.
[1178] 145. A method according to statement 144, wherein the sample is a blood, serum, or plasma sample.
[1179] 146. A method according to statement 145, wherein the sample is a serum sample.
[1180] 147. A method according to any one of statements 104-146, wherein the method further comprises a subsequent step of assessing the activity, expression, or amount of one or more biomarker in the subject, in which a sample profile is obtained after contacting the subject with an agent capable of inhibiting or reversing EMT or a chemotherapeutic agent.
[1181] 148. A method according to statement 103, wherein the sample profile is obtained after contacting the subject with an agent capable of inhibiting or reversing EMT or a chemotherapeutic agent.
[1182] 149. A method according to statement 147 or 148, wherein the control profile is obtained from the same subject prior to contacting said subject with the agent capable of inhibiting or reversing EMT or a chemotherapeutic agent.
[1183] 150. A method according to statement 149, wherein an increase in the activity, expression, or amount of one or more biomarker in the sample profile as compared with the control profile is indicative of higher susceptibility to treatment with an agent capable of inhibiting or reversing EMT or a chemotherapeutic agent.
[1184] 151. A method according to statement 149, wherein a decrease in the activity, expression, or amount of one or more biomarker in the sample profile as compared with the control profile is indicative of higher susceptibility to treatment with an agent capable of inhibiting or reversing EMT or a chemotherapeutic agent.
[1185] 152. A method according to statement 149, wherein an increase in the activity, expression, or amount of one or more biomarker in the sample profile as compared with the control profile is indicative of lower susceptibility to treatment with an agent capable of inhibiting or reversing EMT or a chemotherapeutic agent.
[1186] 153. A method according to statement 149, wherein a decrease in the activity, expression, or amount of one or more biomarker in the sample profile as compared with the control profile is indicative of lower susceptibility to treatment with an agent capable of inhibiting or reversing EMT or a chemotherapeutic agent.
[1187] 154. A method according to statement 150, wherein the one or more biomarker includes at least Axl.
[1188] 155. A method according to any one of statements 147-154, wherein assessing the activity, expression, or amount of one or more biomarker in the subject, or in a sample derived from the subject, comprises:
   [1189] contacting a sample, or an extract from the sample, with at least 1, 2, 3, 4, 5, 6, 7, 8, 9, 10 or more reagents for detecting the activity, expression, or amount of one or more biomarkers, each of which is selective for a particular biomarker; and
   [1190] detecting and/or quantifying said reagents for detecting.
[1191] 156. A method according to statement 155, wherein assessing the expression or amount of one or more biomarker in the subject, or in a sample derived from the subject, comprises:
   [1192] contacting a sample, or an extract from the sample, with at least 1, 2, 3, 4, 5, 6, 7, 8, 9, 10 or more specific binding members, each of which selectively binds to a respective biomarker protein or mRNA; and
   [1193] detecting and/or quantifying formation of a complex formed by said specific binding member and said biomarker protein or mRNA.
[1194] 157. A method according to statement 156, wherein the specific binding member comprises an antibody molecule or binding fragment thereof.
[1195] 158. A method according to statement 156 or 157, wherein detecting formation of a complex formed by the specific binding member and the biomarker protein or mRNA is carried out by use of a technique selected from: Western blot; enzyme-linked immunosorbent assay (ELISA); radioimmunoassay (RIA); competitive enzyme immunoassay; double antibody sandwich ELISA (DAS-ELISA); liquid immunoarray technology; immunocytochemistry; immunohistochemistry; antibody microarray detection; precipitation of colloidal gold; affinity chromatography; ligand binding assay; and lectin binding assay.
[1196] 159. A method according to any one of statements 156-158 wherein the expression or amount of the one or more biomarker is determined as the absolute amount of the respective biomarker protein or mRNA in the sample.
[1197] 160. A method according to any one of statements 156-158 wherein the expression or amount of the one or more biomarker is determined as a relative amount of the respective biomarker protein or mRNA in the sample,
   [1198] optionally wherein the relative amount is determined relative to a reference protein or mRNA in the sample, the expression of which is not altered by AML or MDS.
[1199] 161. A method according to any one of statements 148-160, wherein the agent capable of inhibiting or reversing EMT or chemotherapeutic agent is an Axl inhibitor, Akt3 inhibitor, Slfn11 inhibitor, or PHGDH inhibitor.
[1200] 162. A method according to statement 161, wherein the agent capable of inhibiting or reversing EMT or chemotherapeutic agent is an Axl inhibitor.
[1201] 163. A method according to statement 162, wherein the Axl inhibitor is BGB324/R428/bemcentinib, cabozantinib, TP-0903, foretinib, merestinib, bosutinib, gilteritinib, crizotinib, amuvatinib, sunitinib, sitravatinib, LDC1267, UNC2025, or an anti-Axl antibody described in WO2015/193428, WO2015/193430, WO2016/097370, or WO2016/166296.
[1202] 164. A method according to statement 163, wherein the Axl inhibitor is BGB324/R428/bemcentinib.
[1203] 165. A method according to statement 163, wherein the Axl inhibitor is an anti-Axl antibody described in WO2015/193428, WO2015/193430, WO2016/097370, or WO2016/166296.
[1204] 166. A method according to statement 161, wherein the agent capable of inhibiting or reversing EMT or chemotherapeutic agent is an Akt3 inhibitor.
[1205] 167. A method according to statement 166, wherein the Akt3 inhibitor is an Akt3 inhibitor disclosed in WO2016/102672.
[1206] 168. A method according to any one of statements 161-167, wherein the agent capable of inhibiting or reversing EMT is administered as a single agent.
[1207] 169. A method according to any one of statements 161-167, wherein the agent capable of inhibiting or reversing EMT is administered in combination with a further cancer treatment.
[1208] 170. A method according to statement 169, wherein the further cancer treatment is selected from the further cancer treatments listed in statement 130.
[1209] 171. A method according to statement 169, wherein the further cancer treatment is a pyrimidine analogue, for example azacitidine, capecitabine, cytarabine, edatrexate, floxuridine, fluorouracil, gemcitabine, or troxacitabine, or a cytidine analogue, for example decitabine.
[1210] 172. A method according to statement 171, wherein the further cancer treatment is cytarabine.
[1211] 173. A method according to statement 171, wherein the further cancer treatment is decitabine.
[1212] 174. A method according to any one of statements 148-173, wherein the subject is mammalian.
[1213] 175. A method according to statement 174, wherein the subject is human.
[1214] 176. A method according to any one of statements 148-175, wherein the subject was selected for treatment with the agent capable of inhibiting or reversing EMT or a chemotherapeutic agent, using a predictive method according to any one of statements 101-147.
[1215] 177. A method according to any one of statements 148-176, wherein the sample is selected from: blood, serum, plasma, tissue biopsy, culture supernatant, or urine.
[1216] 178. A method according to statement 177, wherein the sample is a blood, serum, or plasma sample.
[1217] 179. A method according to statement 178, wherein the sample is a serum sample.
[1218] 180. A method according to any one of statements 1-179, wherein the method is performed in vitro or ex vivo.
[1219] 201. A method of selecting subjects having, suspected of having, or diagnosed with acute myelocytic leukemia (AML) or myelodysplastic syndrome (MDS) for treatment with an agent capable of inhibiting or reversing EMT or a chemotherapeutic agent, the method comprising:
   [1220] identifying subjects susceptible to treatment with an agent capable of inhibiting or reversing EMT or a chemotherapeutic agent using a method according to any one of statements 101-180; and
   [1221] selecting thus identified subjects for treatment.
[1222] 202. A method of selecting subjects having, suspected of having, or diagnosed with acute myelocytic leukemia (AML) or myelodysplastic syndrome (MDS) for continued treatment with an agent capable of inhibiting or reversing EMT or a chemotherapeutic agent, the method comprising:
   [1223] identifying subjects susceptible to treatment with an agent capable of inhibiting or reversing EMT or a chemotherapeutic agent using a method according to any one of statements 148-180; and
   [1224] selecting thus identified subjects for treatment.
[1225] 203. A method according to any one of statements 201-202, wherein treatment comprises administering to the subject a therapeutically effective amount of an agent capable of inhibiting or reversing EMT or a chemotherapeutic agent.
[1226] 204. A method according to statement 203, wherein the treatment comprises an Axl inhibitor, Akt3 inhibitor, Slfn11 inhibitor, or PHGDH inhibitor.
[1227] 205. A method according to statement 204, wherein the treatment comprises an Axl inhibitor.
[1228] 206. A method according to statement 205, wherein the Axl inhibitor is BGB324/R428/bemcentinib, cabozantinib, TP-0903, foretinib, merestinib, bosutinib, gilteritinib, crizotinib, amuvatinib, sunitinib, sitravatinib, LDC1267, UNC2025, or an anti-Axl antibody described in WO2015/193428, WO2015/193430, WO2016/097370, or WO2016/166296.
[1229] 207. A method according to statement 206, wherein the Axl inhibitor is BGB324/R428/bemcentinib.
[1230] 208. A method according to statement 206, wherein the Axl inhibitor is an anti-Axl antibody described in WO2015/193428, WO2015/193430, WO2016/097370, or WO2016/166296.
[1231] 209. A method according to statement 204, wherein the treatment comprises an Akt3 inhibitor.
[1232] 210. A method according to statement 209, wherein the Akt3 inhibitor is an Akt3 inhibitor disclosed in WO2016/102672.
[1233] 211. A method according to any one of statements 203-210, wherein the treatment is administered as a single agent.
[1234] 212. A method according to any one of statements 203-211, wherein the treatment is administered in combination with a further cancer treatment.
[1235] 213. A method according to statement 212, wherein the further cancer treatment is selected from the further cancer treatments listed in statement 130.
[1236] 214. A method according to statement 212, wherein the further cancer treatment is a pyrimidine analogue, for example azacitidine, capecitabine, cytarabine, edatrexate, floxuridine, fluorouracil, gemcitabine, or troxacitabine, or a cytidine analogue, for example decitabine.
[1237] 215. A method according to statement 214, wherein the further cancer treatment is cytarabine.
[1238] 216. A method according to statement 214, wherein the further cancer treatment is decitabine.
[1239] 301. A diagnostic kit comprising 1, 2, 3, 4, 5, 6, 7, 8, 9, 10 or more reagents for detecting the activity, expression, or amount of one or more biomarkers, each of which is selective for a particular biomarker selected from the group consisting of: Axl, FGF-21, MMP-10, TFR1, THP, Hemopexin, Haptoglobin, and/or IgM.
[1240] 302. A test device comprising 1, 2, 3, 4, 5, 6, 7, 8, 9, 10 or more reagents for detecting the activity, expression, or amount of one or more biomarkers, each of which is selective for a particular biomarker selected from the group consisting of: Axl, FGF-21, MMP-10, TFR1, THP, Hemopexin, Haptoglobin, and/or IgM.
[1241] 303. A diagnostic kit or test device according to any one of statements 301 or 302, comprising:
   [1242] 1, 2, 3, 4, 5, 6, 7, 8, 9, 10 or more specific binding members, each of which selectively binds to a biomarker selected from the group consisting of: Axl, FGF-21, MMP-10, TFR1, THP, Hemopexin, Haptoglobin, and/or IgM; and
   [1243] one or more reagents for detecting said one or more specific binding members or one or more reagents for detecting and/or quantifying formation of a complex formed by said specific binding member and said biomarker.
[1244] 304. A diagnostic kit or test device according to statement 303, wherein the specific binding member comprises an antibody molecule or binding fragment thereof.
[1245] 305. A diagnostic kit or test device according to statement 303 or 304, wherein detecting formation of a complex formed by the specific binding member and the biomarker is carried out by use of a technique selected from: Western blot; enzyme-linked immunosorbent assay (ELISA); radioimmunoassay (RIA); competitive enzyme immunoassay; double antibody sandwich ELISA (DAS-ELISA); liquid immunoarray technology; immunocytochemistry; immunohistochemistry; antibody microarray detection; precipitation of colloidal gold; affinity chromatography; ligand binding assay; and lectin binding assay.
[1246] 306. A diagnostic kit or test device according to any one of statements 301-305, wherein the kit or test device comprises no more than 15, 20, 25, 30, 40, or 50 reagents for detecting.
[1247] 307. A diagnostic kit or test device according to any one of statements 301-306 for use in a method of predicting a cancer-related outcome in a subject.
[1248] 308. A diagnostic kit for use, or test device for use, according to statement 307, wherein the cancer-related outcome is susceptibility to treatment with an agent capable of inhibiting or reversing EMT or a chemotherapeutic agent.
[1249] 309. A diagnostic kit for use, or test device for use, according to statement 308, wherein the agent capable of inhibiting or reversing EMT or chemotherapeutic agent is an Axl inhibitor, Akt3 inhibitor, Slfn11 inhibitor, or PHGDH inhibitor.
[1250] 310. A diagnostic kit for use, or test device for use, according to statement 308, wherein the agent capable of inhibiting or reversing EMT or chemotherapeutic agent is an Axl inhibitor.
[1251] 311. A diagnostic kit for use, or test device for use, according to statement 310, wherein the Axl inhibitor is BGB324/R428/bemcentinib, cabozantinib, TP-0903, foretinib, merestinib, bosutinib, gilteritinib, crizotinib, amuvatinib, sunitinib, sitravatinib, LDC1267, UNC2025, or an anti-Axl antibody described in WO2015/193428, WO2015/193430, WO2016/097370, or WO2016/166296.
[1252] 312. A diagnostic kit for use, or test device for use, according to statement 311, wherein the Axl inhibitor is BGB324/R428/bemcentinib.
[1253] 313. A diagnostic kit for use, or test device for use, according to statement 311, wherein the Axl inhibitor is an anti-Axl antibody described in WO2015/193428, WO2015/193430, WO2016/097370, or WO2016/166296.
[1254] 314. A diagnostic kit for use, or test device for use, according to statement 308, wherein the agent capable of inhibiting or reversing EMT or chemotherapeutic agent is an Akt3 inhibitor.
[1255] 315. A diagnostic kit for use, or test device for use, according to any one of statements 307-310, wherein the subject has, is suspected of having, or has been diagnosed with acute myelocytic leukemia (AML) or myelodysplastic syndrome (MDS).
[1256] 316. A diagnostic kit for use, or test device for use, according to any one of statements 307-315, wherein the method is a method according to any one of statements 101-180.
[1257] 317. Use of a reagent for detecting the activity, expression, or amount of a biomarker selected from the group consisting of: Axl, FGF-21, MMP-10, TFR1, THP, Hemopexin, Haptoglobin, and/or IgM, in a method of predicting a cancer-related outcome in a subject.
[1258] 318. Use of 1, 2, 3, 4, 5, 6, 7, 8, 9, 10 or more reagents for detecting the activity, expression, or amount a biomarker, each of which is selective for a particular biomarker selected from the group consisting of: Axl, FGF-21, MMP-10, TFR1, THP, Hemopexin, Haptoglobin, and/or IgM, in a method of manufacture of a diagnostic kit or test device for use in a method of predicting a cancer-related outcome in a subject.
[1259] 319. A use according to statement 317 or 318, wherein the reagent for detecting comprises a specific binding member selective for a particular biomarker.
[1260] 320. A use according to statement 317 or 318, wherein the method of predicting a cancer-related outcome in a subject is a method according to any one of statements 101-180.
[1261] 401. Use of one or more of: Axl, FGF-21, MMP-10, TFR1, THP, Hemopexin, Haptoglobin, and/or IgM, as a biomarker for determining if a subject is susceptible to treatment with an agent capable of inhibiting or reversing EMT or a chemotherapeutic agent.
[1262] 402. A use according to statement 401, wherein:
   [1263] (i) a higher activity, expression, or amount of one or more of said biomarkers in the subject, or sample derived from the subject, compared with a control profile for the respective biomarker is indicative of susceptibility to treatment with an agent capable of inhibiting or reversing EMT or a chemotherapeutic agent; or
   [1264] (ii) a lower activity, expression, or amount of one or more of said biomarkers in the subject, or sample derived from the subject, compared with a control profile for the respective biomarker is indicative of susceptibility to treatment with an agent capable of inhibiting or reversing EMT or a chemotherapeutic agent.
[1265] 403. A use according to statement 401, wherein:
   [1266] (i) an increase in the activity, expression, or amount of one or more biomarker relative to a control profile for the respective biomarker after contacting the subject with a cancer therapeutic agent is indicative of increased susceptibility to treatment with an agent capable of inhibiting or reversing EMT or a chemotherapeutic agent; or
   [1267] (ii) a decrease in the activity, expression, or amount of one or more biomarker relative to a control profile for the respective biomarker after contacting the subject with a cancer therapeutic agent is indicative of increased susceptibility to treatment with an agent capable of inhibiting or reversing EMT or a chemotherapeutic agent.
[1268] 404. A use according to any one of statements 401-403, wherein the use is as a biomarker in a method according to any one of statements 101-180
[1269] 501. A method of treating a subject having, suspected of having, or diagnosed with acute myelocytic leukemia (AML) or myelodysplastic syndrome (MDS), the method comprising:
   [1270] identifying a subject susceptible to treatment using a method according to any one of statements 101-180; and
   [1271] administering to the subject a therapeutically effective amount of an agent capable of inhibiting or reversing EMT or a chemotherapeutic agent.
[1272] 502. A method of treating a subject having, suspected of having, or diagnosed with acute myelocytic leukemia (AML) or myelodysplastic syndrome (MDS), the method comprising:
   [1273] (a) obtaining a sample from the subject;
   [1274] (b) determining if the subject is susceptible to treatment with an agent capable of inhibiting or reversing EMT or a chemotherapeutic agent using a method according to any one of statements 101-180;
   [1275] (c) administering to the subject a therapeutically effective amount of an agent capable of inhibiting or reversing EMT or a chemotherapeutic agent.
[1276] 503. A method of treating a subject having, suspected of having, or diagnosed with acute myelocytic leukemia (AML) or myelodysplastic syndrome (MDS), the method comprising administering a therapeutically effective amount of an agent capable of inhibiting or reversing EMT or chemotherapeutic agent to a subject identified as susceptible to said treatment using a method according to any one of statements 101-180.
[1277] 504. A method of treating a subject having, suspected of having, or diagnosed with acute myelocytic leukemia (AML) or myelodysplastic syndrome (MDS), the method comprising:
   [1278] administering to the subject a therapeutically effective amount of an agent capable of inhibiting or reversing EMT or a chemotherapeutic agent; and
   [1279] determining if the subject is susceptible to said treatment using a method according to any one of statements 148-180.
[1280] 505. A method according to statement 504, wherein the method comprises administering to the subject one or more further therapeutically effective amounts of an agent capable of inhibiting or reversing EMT or a chemotherapeutic agent provided that the subject is identified as susceptible to said treatment.
[1281] 506. An agent capable of inhibiting or reversing EMT or chemotherapeutic agent for use in a method of treating a subject having, suspected of having, or diagnosed with acute myelocytic leukemia (AML) or myelodysplastic syndrome (MDS),
   [1282] wherein the method is a method according to any one of statements 501-505.
[1283] 507. Use of an agent capable of inhibiting or reversing EMT or chemotherapeutic agent for use in a method of manufacture of a medicament for use in a method of treating a subject having, suspected of having, or diagnosed with acute myelocytic leukemia (AML) or myelodysplastic syndrome (MDS),
   [1284] wherein the method of treatment is a method according to any one of statements 501-505.
[1285] 508. A method, agent for use, or use according to any one of statements 501-507, wherein the agent capable of inhibiting or reversing EMT or chemotherapeutic agent comprises an Axl inhibitor, Akt3 inhibitor, Slfn11 inhibitor, or PHGDH inhibitor.
[1286] 509. A method, agent for use, or use according to statement 508, wherein the agent capable of inhibiting or reversing EMT or chemotherapeutic agent comprises an Axl inhibitor.
[1287] 510. A method, agent for use, or use according to statement 509, wherein the Axl inhibitor is BGB324/R428/bemcentinib, cabozantinib, TP-0903, foretinib, merestinib, bosutinib, gilteritinib, crizotinib, amuvatinib, sunitinib, sitravatinib, LDC1267, UNC2025, or an anti-Axl antibody described in WO2015/193428, WO2015/193430, WO2016/097370, or WO2016/166296.
[1288] 511. A method, agent for use, or use according to statement 510, wherein the Axl inhibitor is BGB324/R428/bemcentinib.
[1289] 512. A method, agent for use, or use according to statement 510, wherein the Axl inhibitor is an anti-Axl antibody described in WO2015/193428, WO2015/193430, WO2016/097370, or WO2016/166296.
[1290] 512. A method, agent for use, or use according to statement 508, wherein the agent capable of inhibiting or reversing EMT or chemotherapeutic agent comprises an Akt3 inhibitor.
[1291] 513. A method, agent for use, or use according to statement 512, wherein the Akt3 inhibitor is an Akt3 inhibitor disclosed in WO2016/102672.
[1292] 514. A method, agent for use, or use according to any one of statements 501-513, wherein the agent capable of inhibiting or reversing EMT or chemotherapeutic agent is administered as a single agent.
[1293] 515. A method, agent for use, or use according to any one of statements 501-513, wherein the agent capable of inhibiting or reversing EMT or chemotherapeutic agent is administered in combination with a further cancer treatment.
[1294] 516. A method, agent for use, or use according to statement 515, wherein the further cancer treatment is selected from the further cancer treatments listed in statement 130.
[1295] 517. A method, agent for use, or use according to statement 515, wherein the further cancer treatment is a pyrimidine analogue, for example azacitidine, capecitabine, cytarabine, edatrexate, floxuridine, fluorouracil, gemcitabine, or troxacitabine, or a cytidine analogue, for example decitabine.
[1296] 518. A method, agent for use, or use according to statement 517, wherein the further cancer treatment is cytarabine.
[1297] 519. A method, agent for use, or use according to statement 517, wherein the further cancer treatment is decitabine.

[1298] Facet 3a: Acute Myelocytic Leukemia (AML) & Myelodysplastic Syndrome (MDS)

[1299] Biomarkers

[1300] The term “marker” or “biomarker” is used herein to refer to a gene or protein whose expression in a subject or sample derived from a subject is altered or modulated, for example, up or down regulated, in cancer. Where the biomarker is a protein, modulation or alteration of expression encompasses modulation through different post-translational modifications.

[1301] In accordance with any aspect of this facet of the present disclosure the biomarkers described herein may be defined as follows, wherein:
[1302] an Axl biomarker comprises an amino acid sequence having at least 70%, 80%, 90%, 95%, 99% or 100% sequence identity with the full-length of the amino acid sequence disclosed at UniProt accession no: P30530-1 or P30530-2 (entry version 196) or a fragment thereof;
[1303] a Tamm-Horsfall Urinary Glycoprotein (THP) biomarker comprises an amino acid sequence having at least 70%, 80%, 90%, 95%, 99% or 100% sequence identity with the full-length of the amino acid sequence disclosed at UniProt accession no: P07911-1, P07911-2, P07911-3, P07911-4, or P07911-5 (entry version 182) or a fragment thereof;
[1304] a Vitamin D-Binding Protein (VDBP) biomarker comprises an amino acid sequence having at least 70%, 80%, 90%, 95%, 99% or 100% sequence identity with the full-length of the amino acid sequence disclosed at UniProt accession no: P02774-1, P02774-2, or P02774-3 (entry version 201) or a fragment thereof;
[1305] a Epithelial cell adhesion molecule (EpCam) biomarker comprises an amino acid sequence having at least 70%, 80%, 90%, 95%, 99% or 100% sequence identity with the full-length of the amino acid sequence disclosed at UniProt accession no: P16422-1 (entry version 186) or a fragment thereof;
[1306] a Epidermal Growth Factor Receptor (EGFR) biomarker comprises an amino acid sequence having at least 70%, 80%, 90%, 95%, 99% or 100% sequence identity with the full-length of the amino acid sequence disclosed at UniProt accession no: Q504U8 (entry version 138) or a fragment thereof;
[1307] a Fetuin-A biomarker comprises an amino acid sequence having at least 70%, 80%, 90%, 95%, 99% or 100% sequence identity with the full-length of the amino acid sequence disclosed at UniProt accession no: P02765-1 (entry version 205) or a fragment thereof;
[1308] a Interleukin-6 receptor subunit beta (IL-6R beta) biomarker comprises an amino acid sequence having at least 70%, 80%, 90%, 95%, 99% or 100% sequence identity with the full-length of the amino acid sequence disclosed at UniProt accession no: P08887-1 or P08887-2 (entry version 210) or a fragment thereof;
[1309] a Complement Factor H-Related Protein 1 (CFHR1) biomarker comprises an amino acid sequence having at least 70%, 80%, 90%, 95%, 99% or 100% sequence identity with the full-length of the amino acid sequence disclosed at UniProt accession no: Q03591-1 (entry version 163) or a fragment thereof;
[1310] a Growth/differentiation factor 15 (GDF-15) biomarker comprises an amino acid sequence having at least 70%, 80%, 90%, 95%, 99% or 100% sequence identity with the full-length of the amino acid sequence disclosed at UniProt accession no: Q99988-1 (entry version 166) or a fragment thereof;
[1311] a Macrophage-Stimulating Protein (MSP) biomarker comprises an amino acid sequence having at least 70%, 80%, 90%, 95%, 99% or 100% sequence identity with the full-length of the amino acid sequence disclosed at UniProt accession no: P26927 (entry version 179) or a fragment thereof;
[1312] a Paraoxonase-1 (PON-1) biomarker comprises an amino acid sequence having at least 70%, 80%, 90%, 95%, 99% or 100% sequence identity with the full-length of the amino acid sequence disclosed at UniProt accession no: P27169-1 (entry version 202) or a fragment thereof;
[1313] a insulin (C-peptide) biomarker comprises an amino acid sequence having at least 70%, 80%, 90%, 95%, 99% or 100% sequence identity with the full-length of the amino acid sequence disclosed at UniProt accession no: P01308-1 (entry version 245), F8WCM5-1 (entry version 57) or a fragment thereof; and/or
[1314] an Apolipoprotein A-II (Apo A-II) biomarker comprises an amino acid sequence having at least 70%, 80%, 90%, 95%, 99% or 100% sequence identity with the full-length of the amino acid sequence disclosed at UniProt accession no: P02652-1 (entry version 217) or a fragment thereof.

[1315] The biomarkers described herein may also be defined as a nucleic acid (either DNA or RNA) having at least 70%, 80%, 90%, 95%, 99% or 100% sequence identity with the full-length nucleic acid sequence encoding any of the above amino acid sequences.

[1316] Identity may be as defined using sequence comparisons made using FASTA and FASTP (see Pearson & Lipman, 1988. Methods in Enzymology 183: 63-98). Parameters are preferably set, using the default matrix, as follows: Gapopen (penalty for the first residue in a gap): −12 for proteins/-16 for DNA; Gapext (penalty for additional residues in a gap): −2 for proteins/-4 for DNA; KTUP word length: 2 for proteins/6 for DNA.

[1317] Pre-Treatment Predictive Biomarkers and Methods

[1318] By analysing patient data obtained from clinical trial BGBC003 (NCT02488408), the authors have discovered that, prior to treatment of subjects having AML or MDS, certain of the biomarkers described herein are present in the serum of “responder” subjects at higher levels than in the serum of “non-responder” subjects—see Example 1. Similarly, prior to treatment of the subject certain of the biomarkers described herein are present in the serum of “responder” subjects at lower levels than in the serum of “non-responder” subjects. Thus, by assessing the activity, expression, or amount of one or more of the biomarkers described herein prior to treatment with an agent capable of inhibiting or reversing EMT or a chemotherapeutic agent it is possible to determine the likelihood of that subject being susceptible or responsive to treatment with said agent.

[1319] Accordingly, in a first aspect of this facet, the disclosure provides a method of predicting a cancer-related outcome in a subject having, suspected of having, or diagnosed with acute myelocytic leukemia (AML) or myelodysplastic syndrome (MDS), the method comprising assessing the activity, expression, or amount of one or more of the biomarkers described herein in the subject, or in a sample derived from the subject.

[1320] In some embodiments the one or more biomarker is selected from the group consisting of: VDBP, THP, EpCam, EGFR, Fetuin-A, IL-6R beta, Axl, CFHR1, GDF-15, MSP, PON-1, insulin (C-peptide), and/or Apo A-II.

[1321] A “cancer-related outcome” as described herein is a clinical prediction or prognosis associated with cancer. In some embodiments the cancer-related outcome is susceptibility to treatment with an agent capable of inhibiting or reversing EMT or a chemotherapeutic agent.

[1322] In some embodiments the method comprises assessing the activity, expression, or amount of one or more of the biomarkers described herein in the subject, or in a sample derived from the subject, to obtain a sample profile of the one or more biomarker; and, making a prediction based on the sample profile of the one or more biomarker.

[1323] A “sample profile” as used herein is a profile of numerical values or numerical ranges corresponding to the activity, expression, or amount of respective biomarkers determined in the subject or sample derived from the subject.

[1324] In some embodiments of the method the prediction is made by comparing the sample profile to a control profile. A “control profile” as used herein is a profile of numerical values or numerical ranges corresponding to the activity, expression, or amount of the same biomarkers as for the sample profile, determined in a control subject or population of control subjects. Suitable control profiles are described in more detail below.

[1325] Prior to treatment of a subject, certain of the biomarkers described herein have been found to exhibit up-regulated expression in “responder” subjects—that is, certain of the biomarkers described herein have been found to be present in the serum of “responder” subjects at higher levels than in the serum of “non-responder” subjects. Similarly, prior to treatment of a subject, certain of the biomarkers described herein have been found to exhibit down-regulated expression in “responder” subjects—that is, certain of the biomarkers described herein have been found to be present in the serum of “responder” subjects at lower levels than in the serum of “non-responder” subjects.

[1326] This difference in expression level between “responder” and “non-responder” subjects can also be expressed in the opposite way. That is to say, prior to treatment of a subject, certain of the biomarkers described herein have been found to exhibit down-regulated expression in “non-responder” subjects—that is, certain of the biomarkers described herein have been found to be present in the serum of “non-responder” subjects at lower levels than in the serum of “responder” subjects. Similarly, prior to treatment of a subject, certain of the biomarkers described herein have been found to exhibit up-regulated expression in “non-responder” subjects—that is, certain of the biomarkers described herein have been found to be present in the serum of “non-responder” subjects at higher levels than in the serum of “responder” subjects.

[1327] The discovery of these differential patterns of expression mean that, by assessing the activity, expression, or amount of one or more of the biomarkers described herein prior to treatment of a subject with an agent, it is possible to determine the likelihood of that subject being susceptible or responsive to treatment with said agent. Accordingly, in particularly preferred embodiments the sample profile is obtained before the subject is contacted with or administered the agent capable of inhibiting or reversing EMT or a chemotherapeutic agent.

[1328] A subject who is “susceptible to treatment” with an agent capable of inhibiting or reversing EMT or a chemotherapeutic agent is one who is likely to, or who does, respond to treatment (or benefit from treatment) with an agent capable of inhibiting or reversing EMT or a chemotherapeutic agent. That is, a subject who is “susceptible to treatment” with an agent is a “responder” subject for that agent, as defined above. A prediction that is “indicative of susceptibility” is one which suggests or points towards the likelihood that a subject will respond to or benefit from treatment.

[1329] In some embodiments the predictive methods of the disclosure comprise assessing the activity, expression, or amount of one or more of the biomarkers described herein in the subject, or in a sample derived from the subject, to obtain a sample profile of the one or more biomarker; and, making a prediction based on the sample profile of the one or more biomarker. In some embodiments of the method the prediction is made by comparing the sample profile to a control profile, wherein the control profile is a profile of numerical values or numerical ranges corresponding to the activity, expression, or amount of the same biomarkers as for the sample profile, determined in a control subject or population of control subjects.

[1330] In some embodiments the control profile may be obtained from a population of control subjects having AML or MDS. In some embodiments the control profile may be obtained from a population of control subjects not having AML or MDS. In other embodiments the control profile may be obtained from a control subject or population of control subjects having AML or MDS and previously found to lack susceptibility to treatment with an agent capable of inhibiting or reversing EMT or a chemotherapeutic agent (that is, non-responder subjects).

[1331] In some embodiments the control profile may a predetermined profile of biomarker expression, activity, or amount values, for example a profile of “mean” values, “threshold” values, or “standard ranges” of values. This predetermined profile of biomarker expression, activity, or amount values can be obtained, for example, from a control subject or population of control subjects having AML or MDS, a control subject or population of control subjects not having AML or MDS, or a control subject or population of control subjects having AML or MDS and previously found to lack susceptibility to treatment with an agent capable of inhibiting or reversing EMT or a chemotherapeutic agent (that is, non-responder subjects).

[1332] In some other embodiments the control profile may be obtained from a control subject or population of control subjects having AML or MDS and previously found to be susceptible to treatment with an agent capable of inhibiting or reversing EMT or a chemotherapeutic agent (that is, responder subjects). In some embodiments the control profile may a predetermined profile of biomarker expression, activity, or amount values, for example a profile of “threshold”, values or “standard ranges” of values. This predetermined profile of biomarker expression, activity, or amount values can be obtained, for example, from a control subject or population of control subjects having AML or MDS and previously found to be susceptible to treatment with an agent capable of inhibiting or reversing EMT or a chemotherapeutic agent (that is, responder subjects).

[1333] In some other embodiments the control profile may be obtained from a control sample having a known amount (for example a “threshold” amount) of the same biomarkers as will be determined in the sample profile. This threshold amount can be obtained, for example, from non-responder or responder subjects as outlined above.

[1334] The skilled person is readily able to determine suitable “mean”, “threshold”, or “standard range” values for a particular biomarker.

[1335] For example, a “mean” value may be determined by: assessing the activity, expression, or amount of a particular biomarker in a population of subjects having (or not having) AML or MDS; and, averaging the biomarker activity, expression, or amount determined to determine a “mean” value.

[1336] For example, a “mean” value may be determined by: assessing the activity, expression, or amount of a particular biomarker in a population of subjects; determining which subjects in the population are susceptible to treatment with an agent capable of inhibiting or reversing EMT or a chemotherapeutic agent; and, averaging the biomarker activity, expression, or amount determined in subjects found to be susceptible to treatment with an agent capable of inhibiting or reversing EMT or a chemotherapeutic agent (that is, responder subjects) to determine a “mean” value.

[1337] For example, a “threshold” value may be determined by: assessing the activity, expression, or amount of a particular biomarker in a population of subjects; determining which subjects in the population are susceptible to treatment with an agent capable of inhibiting or reversing EMT or a chemotherapeutic agent; and, selecting as appropriate the highest or lowest biomarker activity, expression, or amount determined in a subject found to be susceptible to treatment with an agent capable of inhibiting or reversing EMT or a chemotherapeutic agent (that is, a responder subject) as the “threshold value”.

[1338] For example, a “standard range” of values may be determined by: assessing the activity, expression, or amount of a particular biomarker in a population of subjects having (or not having) AML or MDS; and, determining a “standard range” of values based on this assessment.

[1339] For example, a “standard range” of values may be determined by: assessing the activity, expression, or amount of a particular biomarker in a population of subjects; determining which subjects in the population are susceptible to treatment with an agent capable of inhibiting or reversing EMT or a chemotherapeutic agent; and, determining a “standard range” of values for subjects found to be susceptible to treatment with an agent capable of inhibiting or reversing EMT or a chemotherapeutic agent (that is, a responder subject) based on this assessment.

[1340] Where the control profile is a predetermined profile of biomarker expression, activity, or amount values, this may be provided as a “look-up table” or data record. Predetermined control profiles of this type may be a profile of numerical values or numerical ranges corresponding to a measure of central tendency (such as an average, median or mean) amount of the respective biomarkers determined in a plurality of control subjects (for example non-responder or responder subjects as outlined above). The skilled person is readily able to determine both a measure of central tendency and a measure of variability within a population using standard protein quantification techniques and suitable statistical tools.

[1341] Accordingly, in embodiments in which the control profile is: obtained from a population of control subjects having AML or MDS; obtained from a population of control subjects not having AML or MDS; obtained from a control subject or population of control subjects having AML or MDS and previously found to lack susceptibility to treatment with an agent capable of inhibiting or reversing EMT or a chemotherapeutic agent (that is non-responder subjects); a predetermined profile of biomarker expression, activity, or amount values (for example a profile of “average, median, or mean” values or “standard ranges” of values) obtained from non-responder subjects; obtained from a control sample having a known “average, median, or mean” value of biomarkers indicative of non-responder subjects; a predetermined profile of biomarker expression, activity, or amount “threshold” values obtained from responder subjects; or, obtained from a control sample having a known “threshold” value of biomarkers indicative of responder subjects; then, a higher activity, expression, or amount of one or more of the biomarkers described herein in a sample profile as compared with the control profile may be indicative of susceptibility to treatment with an agent capable of inhibiting or reversing EMT or a chemotherapeutic agent. Similarly, a lower activity, expression, or amount of one or more of the biomarkers described herein in the sample profile as compared with a control profile may be indicative of susceptibility to treatment with an agent capable of inhibiting or reversing EMT or a chemotherapeutic agent.

[1342] In some such embodiments, the method may comprise assessing the activity, expression, or amount of one or more of biomarker selected from: VDBP, THP, EpCam, EGFR, Fetuin-A, IL-6R beta, MSP, PON-1, and/or Apo A-II.; wherein a higher activity, expression, or amount of one or more of said biomarkers in the sample profile as compared with the control profile is indicative of susceptibility to treatment with an agent capable of inhibiting or reversing EMT or a chemotherapeutic agent.

[1343] In some such embodiments, the method may comprise assessing the activity, expression, or amount of one or more of biomarker selected from: Axl, GDF-15, Insulin (c-peptide) and/or CFHR1; wherein a lower activity, expression, or amount of one or more of said biomarkers in the sample profile as compared with the control profile is indicative of susceptibility to treatment with an agent capable of inhibiting or reversing EMT or a chemotherapeutic agent.

[1344] In some such embodiments: a lower activity, expression, or amount of Axl; and/or a lower activity, expression, or amount of GDF-15; and/or a lower activity, expression, or amount of Insulin (c-peptide); and/or a lower activity, expression, or amount of CFHR1; and/or a higher activity, expression, or amount of VDBP; and/or a higher activity, expression, or amount of THP; and/or a higher activity, expression, or amount of EpCam; and/or a higher activity, expression, or amount of EGFR; and/or a higher activity, expression, or amount of Fetuin-A and/or a higher activity, expression, or amount of IL-6R beta; and/or a higher activity, expression, or amount of MSP; and/or a higher activity, expression, or amount of PON-1; and/or a higher activity, expression, or amount of Apo A-II; in the sample profile as compared with the control profile is indicative of susceptibility to treatment with an agent capable of inhibiting or reversing EMT or a chemotherapeutic agent.

[1345] In embodiments in which the control profile is: obtained from a control subject or population of control subjects having AML or MDS and previously found to be susceptible to treatment with an agent capable of inhibiting or reversing EMT or a chemotherapeutic agent (that is, responder subjects); then, if the expression, activity, or amount values in the sample profile are above a “threshold” value typical of a responder subject (that is, a subject having AML or MDS and previously found to be susceptible to treatment with an agent capable of inhibiting or reversing EMT or a chemotherapeutic agent) this is indicative of susceptibility to treatment with an agent capable of inhibiting or reversing EMT or a chemotherapeutic agent. Similarly, if the expression, activity, or amount values in the sample profile are below the “threshold” value typical of a responder subject (that is, a subject having AML or MDS and previously found to be susceptible to treatment with an agent capable of inhibiting or reversing EMT or a chemotherapeutic agent) this is indicative of a lack of susceptibility to treatment with an agent capable of inhibiting or reversing EMT or a chemotherapeutic agent.

[1346] In embodiments in which the control profile is: a predetermined profile of “standard ranges” of biomarker expression, activity, or amount values obtained from responder subjects; then, if the expression, activity, or amount values in the sample profile are within the “standard range” of values typical of a responder subject (that is, a subject having AML or MDS and previously found to be susceptible to treatment with an agent capable of inhibiting or reversing EMT or a chemotherapeutic agent) this is indicative of susceptibility to treatment with an agent capable of inhibiting or reversing EMT or a chemotherapeutic agent. Similarly, if the expression, activity, or amount values in the sample profile are outside the “standard range” of values typical of a responder subject (that is, a subject having AML or MDS and previously found to be susceptible to treatment with an agent capable of inhibiting or reversing EMT or a chemotherapeutic agent) this is indicative of a lack of susceptibility to treatment with an agent capable of inhibiting or reversing EMT or a chemotherapeutic agent.

[1347] In embodiments in which the control profile is: a predetermined profile of “standard ranges” of biomarker expression, activity, or amount values obtained from non-responder subjects; then, if the expression, activity, or amount values in the sample profile are within the “standard range” of values typical of a non-responder subject (that is, a subject having AML or MDS and previously found to lack susceptibility to treatment with an agent capable of inhibiting or reversing EMT or a chemotherapeutic agent) this is indicative of a lack of susceptibility to treatment with an agent capable of inhibiting or reversing EMT or a chemotherapeutic agent. Similarly, if the expression, activity, or amount values in the sample profile are outside the “standard range” of values typical of a non-responder subject (that is, a subject having AML or MDS and previously found to lack susceptibility to treatment with an agent capable of inhibiting or reversing EMT or a chemotherapeutic agent) this may be indicative of susceptibility to treatment with an agent capable of inhibiting or reversing EMT or a chemotherapeutic agent.

[1348] In embodiments in which the control profile is: obtained from a population of control subjects not having AML or MDS; then, if the expression, activity, or amount values in the sample profile are outside a “standard range” of values typical of subjects not having AML or MDS, this is indicative of susceptibility to treatment with an agent capable of inhibiting or reversing EMT or a chemotherapeutic agent. Similarly, if the expression, activity, or amount values in the sample profile are within a “standard range” of values typical of subjects not having AML or MDS, this is indicative of a lack of susceptibility to treatment with an agent capable of inhibiting or reversing EMT or a chemotherapeutic agent. In such cases, an expression, activity or amount value may be outside the “standard range” of values when it is either above the upper limit of normal or below the lower limit of normal for a given biomarker. The upper limit of normal and lower limit of normal are the limits of the normal distribution of a given biomarker in a population of control subjects not having AML or MDS.

[1349] The skilled person is readily able to determine whether the sample profile is indicative of susceptibility or lack of susceptibility to treatment with an agent capable of inhibiting or reversing EMT or a chemotherapeutic agent using suitable statistical tools and comparison with the appropriate control.

[1350] In some embodiments the sample profile may be compared with two or more control profiles as described above.

[1351] As used herein, the term “one or more” means 1, 2, 3, 4, 5, 6, 7, 8, 9, 10, 11, 12, 13, 14, 15, 16, 17, 18, 19, or 20 of the biomarkers described herein. In some embodiments the one or more biomarker is Axl. In some embodiments the one or more biomarker is VDBP. In some embodiments the one or more biomarker is THP. In some embodiments the one or more biomarker is EpCam. In some embodiments the one or more biomarker is EGFR. In some embodiments the one or more biomarker is Fetuin-A. In some embodiments the one or more biomarker is IL-6R beta.

[1352] In some embodiments the method may comprise assessing the activity, expression, or amount of at least 2, 3, 4, 5, 6, 7, 8, 9, 10, 11, 12, 13, 14, 15, 20 of said biomarkers in the subject, or in a sample derived from the subject. In some embodiments the method may comprise assessing the activity, expression, or amount of Axl and at least 1, 2, 3, 4, 5, 6, 7, 8, 9, 10, 11, 12, 13, 14, 15, 20 further biomarkers described herein in the subject, or in a sample derived from the subject.

[1353] Subject

[1354] A “subject” as referred to herein is any species of animal classified as a mammal, and includes but is not restricted to, domestic and farm animals, primates and humans. In some preferred embodiments the subject is a human of any sex or race. In some embodiments, the human is an adult human.

[1355] In some embodiments the predictive methods described herein are performed before the subject receives a treatment or course of treatment for AML or MDS. In other embodiments the predictive method is performed during or after a treatment or course of treatment for AML or MDS. In some embodiments the treatment or course of treatment for AML or MDS is an agent capable of inhibiting or reversing EMT. In other embodiments the treatment or course of treatment for AML or MDS is a chemotherapeutic treatment that is not an agent capable of inhibiting or reversing EMT.

[1356] In some embodiments of the predictive methods described herein the subject has previously been treated with an agent capable of inhibiting or reversing EMT or a chemotherapeutic agent. In some embodiments the subject has previously been treated with an agent selected from: a PHGDH inhibitor, a Slfn11 inhibitor, an Axl inhibitor, or an Akt3 inhibitor.

[1357] In some embodiments of the predictive methods described herein the subject has previously been treated with an agent that is different to the agent capable of inhibiting or reversing EMT or chemotherapeutic agent for which the subject's response is being predicted. That is, the subject has previously been treated with an agent that is not the agent which the predictive method is determining the subject's susceptibility to. Accordingly, in some embodiments, the subject has not previously been treated with an agent capable of inhibiting or reversing EMT or a chemotherapeutic agent. In some preferred embodiments, the subject has not previously been treated with an Axl inhibitor. In other preferred embodiments, the subject has not previously been treated with an Akt3 inhibitor.

[1358] Post-Treatment Changes in Biomarkers

[1359] In some embodiments of this aspect of the disclosure, the predictive method further comprises a subsequent step of assessing the activity, expression, or amount of one or more biomarker in the subject, or in a sample derived from the subject, to obtain a second sample profile of one or more of the biomarkers described herein after the subject has received a treatment or course of treatment an agent capable of inhibiting or reversing EMT or a chemotherapeutic agent.

[1360] That is, in some embodiments, the predictive method comprises:
[1361] (a) determining if a subject is susceptible to treatment with an agent capable of inhibiting or reversing EMT or a chemotherapeutic agent by assessing the activity, expression, or amount of one or more biomarker in the subject, as outlined above;
[1362] (b) administering to the subject a therapeutically effective amount of an agent capable of inhibiting or reversing EMT or a chemotherapeutic agent; and
[1363] (c) subsequently assessing the activity, expression, or amount of one or more biomarker in the subject, or in a sample derived from the subject.

[1364] In some embodiments, the predictive method comprises:
[1365] (a) determining if a subject is susceptible to treatment with an agent capable of inhibiting or reversing EMT or a chemotherapeutic agent by assessing the activity, expression, or amount of one or more biomarker in the subject, or in a sample derived from the subject, wherein the one or more biomarker is selected from the group consisting of: VDBP, THP, EpCam, EGFR, Fetuin-A, IL-6R beta, Axl, CFHR1, GDF-15, MSP, PON-1, insulin (C-peptide), and/or Apo A-II;
[1366] (b) administering to the subject a therapeutically effective amount of an agent capable of inhibiting or reversing EMT or a chemotherapeutic agent; and
[1367] (c) subsequently assessing the activity, expression, or amount of one or more biomarker in the subject, or in a sample derived from the subject.

[1368] In some preferred embodiments the methods comprise subsequently assessing the activity, expression, or amount of Axl in the subject, or in a sample derived from the subject. In some embodiments an increase in the activity, expression, or amount of Axl in the second sample profile as compared with a control profile after contacting the subject with a cancer therapeutic agent is indicative of higher susceptibility to treatment with an agent capable of inhibiting or reversing EMT or a chemotherapeutic agent. In some preferred embodiments the control profile is obtained from the same subject prior to treatment with an agent capable of inhibiting or reversing EMT or a chemotherapeutic agent.

[1369] In some preferred embodiments the methods comprise subsequently assessing the activity, expression, or amount of VDBP in the subject, or in a sample derived from the subject. In some embodiments an increase in the activity, expression, or amount of VDBP in the second sample profile as compared with a control profile after contacting the subject with a cancer therapeutic agent is indicative of higher susceptibility to treatment with an agent capable of inhibiting or reversing EMT or a chemotherapeutic agent. In some preferred embodiments the control profile is obtained from the same subject prior to treatment with an agent capable of inhibiting or reversing EMT or a chemotherapeutic agent.

[1370] In some preferred embodiments the methods comprise subsequently assessing the activity, expression, or amount of THP in the subject, or in a sample derived from the subject. In some embodiments an increase in the activity, expression, or amount of THP in the second sample profile as compared with a control profile after contacting the subject with a cancer therapeutic agent is indicative of higher susceptibility to treatment with an agent capable of inhibiting or reversing EMT or a chemotherapeutic agent. In some preferred embodiments the control profile is obtained from the same subject prior to treatment with an agent capable of inhibiting or reversing EMT or a chemotherapeutic agent.

[1371] In some preferred embodiments the methods comprise subsequently assessing the activity, expression, or amount of EpCam in the subject, or in a sample derived from the subject. In some embodiments an increase in the activity, expression, or amount of EpCam in the second sample profile as compared with a control profile after contacting the subject with a cancer therapeutic agent is indicative of higher susceptibility to treatment with an agent capable of inhibiting or reversing EMT or a chemotherapeutic agent. In some preferred embodiments the control profile is obtained from the same subject prior to treatment with an agent capable of inhibiting or reversing EMT or a chemotherapeutic agent.

[1372] Post-Treatment Predictive Biomarkers and Methods

[1373] By analysing patient data obtained from clinical trial BGBC003 (NCT02488408), the authors have discovered that, following treatment of subjects having AML or MDS with an agent capable of inhibiting or reversing EMT or a chemotherapeutic agent, the levels of certain of the biomarkers described herein increases in the serum of “responder” subjects but not in the serum of “non-responder” subjects—see Example 1. Similarly, following treatment with an agent capable of inhibiting or reversing EMT or a chemotherapeutic agent, the levels of certain of the biomarkers described herein decreases in the serum of “responder” subjects but not in the serum of “non-responder” subjects. Thus, by assessing the activity, expression, or amount of one or more of the biomarkers described herein prior to and following treatment with an agent capable of inhibiting or reversing EMT or a chemotherapeutic agent it is possible to determine or confirm that the subject is susceptible or responsive to treatment with said agent.

[1374] Accordingly, in a second aspect of this facet the disclosure provides a method of predicting a cancer-related outcome in a subject having, suspected of having, or diagnosed with acute myelocytic leukemia (AML) or myelodysplastic syndrome (MDS), the method comprising assessing the activity, expression, or amount of one or more of the biomarkers described herein in a subject, or in a sample derived from the subject after the subject has been contacted with an agent capable of inhibiting or reversing EMT or a chemotherapeutic agent. In some embodiments the cancer-related outcome is susceptibility to treatment with an agent capable of inhibiting or reversing EMT or a chemotherapeutic agent.

[1375] In some embodiments the method comprises assessing the activity, expression, or amount of one or more of the biomarkers described herein in the subject, or in a sample derived from the subject, to obtain a sample profile of the one or more biomarker; and, making a prediction based on the sample profile of the one or more biomarker. In some embodiments of the method the prediction is made by comparing the sample profile to a control profile. In preferred embodiments the sample profile is obtained after contacting the subject with an agent capable of inhibiting or reversing EMT or a chemotherapeutic agent.

[1376] A “control profile” as used herein is a profile of numerical values or numerical ranges corresponding to the activity, expression, or amount of the same biomarkers as for the sample profile, determined in a control subject or population of control subjects.

[1377] In preferred embodiments of this aspect of the disclosure the control profile is obtained from the same subject prior to treatment with an agent capable of inhibiting or reversing EMT or a chemotherapeutic agent. In some embodiments the control profile is obtained from a population of control subjects having AML or MDS. In other embodiments, the control profile is a predetermined profile of biomarker expression, activity, or amount values, for example a profile of “threshold” values or “standard ranges” of values.

[1378] Accordingly, in embodiments in which the control profile is obtained from the same subject prior to treatment with an agent capable of inhibiting or reversing EMT or a chemotherapeutic agent, an increase in the activity, expression, or amount of one or more biomarker in the sample profile as compared with a control profile after contacting the subject with an agent capable of inhibiting or reversing EMT or a cancer therapeutic agent may be indicative of susceptibility to treatment with an agent capable of inhibiting or reversing EMT or a chemotherapeutic agent. In such embodiments, a decrease in the activity, expression, or amount of one or more biomarker in the sample profile as compared with a control profile after contacting the subject with a cancer therapeutic agent may be indicative of higher susceptibility to treatment with an agent capable of inhibiting or reversing EMT or a chemotherapeutic agent.

[1379] In some such embodiments, an increase in the activity, expression, or amount of one or more biomarker in the sample profile as compared with a control profile after contacting the subject with a cancer therapeutic agent may be indicative of lower susceptibility to treatment with an agent capable of inhibiting or reversing EMT or a chemotherapeutic agent. In some such embodiments, a decrease in the activity, expression, or amount of one or more biomarker in the sample profile as compared with a control profile after contacting the subject with a cancer therapeutic agent may be indicative of lower susceptibility to treatment with an agent capable of inhibiting or reversing EMT or a chemotherapeutic agent.

[1380] In some preferred embodiments the one or more biomarker includes at least Axl. In some embodiments the one or more biomarker is Axl. In some embodiments an increase in the activity, expression, or amount of Axl in the sample profile as compared with a control profile after contacting the subject with a cancer therapeutic agent is indicative of higher susceptibility to treatment with an agent capable of inhibiting or reversing EMT or a chemotherapeutic agent.

[1381] In some preferred embodiments the one or more biomarker includes at least VDBP. In some embodiments the one or more biomarker is VDBP. In some embodiments an increase in the activity, expression, or amount of VDBP in the sample profile as compared with a control profile after contacting the subject with a cancer therapeutic agent is indicative of higher susceptibility to treatment with an agent capable of inhibiting or reversing EMT or a chemotherapeutic agent.

[1382] In some preferred embodiments the one or more biomarker includes at least THP. In some embodiments the one or more biomarker is THP. In some embodiments an increase in the activity, expression, or amount of THP in the sample profile as compared with a control profile after contacting the subject with a cancer therapeutic agent is indicative of higher susceptibility to treatment with an agent capable of inhibiting or reversing EMT or a chemotherapeutic agent.

[1383] In some preferred embodiments the one or more biomarker includes at least EpCam. In some embodiments the one or more biomarker is EpCam. In some embodiments an increase in the activity, expression, or amount of EpCam in the sample profile as compared with a control profile after contacting the subject with a cancer therapeutic agent is indicative of higher susceptibility to treatment with an agent capable of inhibiting or reversing EMT or a chemotherapeutic agent.

[1384] Subject

[1385] A “subject” as referred to herein is any species of animal classified as a mammal, and includes but is not restricted to, domestic and farm animals, primates and humans. In some preferred embodiments the subject is a human of any sex or race. In some embodiments, the human is an adult human.

[1386] In some embodiments of this aspect of the disclosure, the subject was selected for treatment with the agent capable of inhibiting or reversing EMT or a chemotherapeutic agent, using a predictive method according to the first aspect of this facet of the disclosure outlined above.

[1387] Agents Capable of Inhibiting or Reversing EMT

[1388] The present disclosure provides methods for predicting a cancer-related outcome in a subject having, suspected of having, or diagnosed with acute myelocytic leukemia (AML) or myelodysplastic syndrome (MDS). A “cancer-related outcome” is a clinical prediction or prognosis associated with cancer.

[1389] The agents capable of inhibiting or reversing EMT for use in this AML or MDS facet of the disclosure are defined as described above in the AML facet (see identically titled section above on page 14, line 19 to page 17, line 7).

[1390] Assessing Biomarker Activity, Expression, Amount

[1391] In some embodiments of the predictive methods described herein, assessing the activity, expression, or amount of one or more biomarker in a subject, or in a sample derived from a subject, comprises: contacting a sample, or an extract from a sample, with at least 1, 2, 3, 4, 5, 6, 7, 8, 9, 10 or more reagents for detecting the activity, expression, or amount of one or more biomarkers, each of which is selective for a particular biomarker; and, detecting and/or quantifying said reagents for detecting.

[1392] In some preferred embodiments, assessing the expression or amount of the one or more biomarker comprises determining the level of the one or more biomarker protein or mRNA in the subject or sample derived from the subject. Preferably the expression or amount of the one or more biomarker is assessed by determining the level of protein expression. In particularly preferred embodiments the expression or amount of the one or more biomarker is assessed by determining the level of protein expression in serum.

[1393] The term “expression” refers to the transcription of a gene's DNA template to produce the corresponding mRNA and translation of this mRNA to produce the corresponding gene product (i.e., a peptide, polypeptide, or protein) as well as the “expression” of a protein in one or more forms that may have been modified post translation.

[1394] In some embodiments determining the level of the one or more biomarker protein or mRNA comprises: contacting a sample, or an extract from a sample, with at least 1, 2, 3, 4, 5, 6, 7, 8, 9, 10 or more specific binding members, each of which selectively binds to a respective biomarker protein or mRNA; and, detecting and/or quantifying formation of complex formed by said specific binding member and said biomarker protein or mRNA. In some embodiments the specific binding member may comprise an antibody molecule or a binding fragment thereof.

[1395] A range of suitable techniques for determining protein and mRNA expression levels are well known in the art, for example microarray analysis, Western blotting, and PCR techniques such as QPCR. In some embodiments, determining the expression or amount of the one or more biomarker protein or mRNA may comprise use of a technique selected from: Western blot; enzyme-linked immunosorbent assay (ELISA); radioimmunoassay (RIA); competitive enzyme immunoassay; double antibody sandwich ELISA (DAS-ELISA); liquid immunoarray technology; immunocytochemistry; immunohistochemistry; antibody microarray detection; precipitation of colloidal gold; affinity chromatography; ligand binding assay; and lectin binding assay.

[1396] In some embodiments, the expression or amount of the one or more biomarker is determined as an absolute amount of the respective biomarker protein or mRNA in the sample. In such cases, the respective biomarker protein or mRNA may be quantified in the sample and the amount expressed as a measure of the sample, for example the volume, mass, or total protein content of the sample.

[1397] In some embodiments, the expression or amount of the one or more biomarker is determined as a relative amount of the respective biomarker protein or mRNA in the sample, wherein the relative amount is determined relative to a reference protein or mRNA in the sample. Determining the relative amount of biomarker protein or mRNA in this way allows for normalisation to, e.g., account for differences in total protein concentration and to remove bias from sample to sample.

[1398] Preferably the reference protein or mRNA is one whose expression or amount does not vary significantly between subjects having cancer and subjects not having cancer, in particular AML or MDS. That is, the reference protein or mRNA is preferably one whose expression or amount is not altered by AML or MDS.

[1399] Accordingly, the reference protein or mRNA may comprise one or more protein or mRNA which is not one of the biomarkers described herein. When expressing the expression or amount of the one or more biomarker as a relative amount, the absolute amount of the respective biomarker protein or mRNA in the sample may be divided by the absolute amount of the reference protein or mRNA in the sample.

[1400] Assessing Biomarker Expression at the RNA Level

[1401] Gene expression can be detected at the RNA level. RNA may be extracted from cells using RNA extraction techniques including, for example, using acid phenol/guanidine isothiocyanate extraction (RNAzol B; Biogenesis), RNeasy RNA preparation kits (Qiagen) or PAXgene (PreAnalytix, Switzerland). Typical assay formats utilising ribonucleic acid hybridisation include nuclear run-on assays, RT-PCR, RNase protection assays (Melton et al., Nuc. Acids Res. 12:7035), Northern blotting and In Situ hybridization. Gene expression can also be detected by microarray analysis as described below.

[1402] Assessing Biomarker Expression at the Protein Level

[1403] Preferably biomarker level is assessed by measuring protein expression. Altered gene or protein expression may also be detected by measuring the polypeptides encoded by the gene. This may be achieved by using molecules which bind to the polypeptides encoded by the biomarker gene. Suitable molecules/agents which bind either directly or indirectly to the polypeptides in order to detect the presence of the protein include naturally occurring molecules such as peptides and proteins, for example antibodies, or they may be synthetic molecules.

[1404] Antibodies may be derived from commercial sources or through techniques which are familiar to those skilled in the art. In one embodiment, and where altered expression manifests itself through the expression of alteration of post translationally-modified forms of a protein biomarker, antibodies specific for those different forms may be used. For the purposes of this disclosure, the term “antibody”, unless specified to the contrary, includes whole antibodies, or fragments of whole antibodies which retain their binding activity for a target antigen. Such fragments include Fv, F(ab′) and F(ab′)2 fragments, as well as single chain antibodies (scFv). Furthermore, the antibodies and fragments thereof may be humanised antibodies, for example as described in EP239400A. For example: monoclonal and polyclonal antibodies, recombinant antibodies, proteolytic and recombinant fragments of antibodies (Fab, Fv, scFv, diabodies), single-domain antibodies (VHH, sdAb, nanobodies, IgNAR, VNAR), and proteins unrelated to antibodies, which have been engineered to have antibody-like specific binding. Antibodies may be bound to a solid support and/or packaged into kits in a suitable container along with suitable reagents, controls, instructions and the like.

[1405] Arrays

[1406] Array technology and the various techniques and applications associated with it are well known in the art. Array technology overcomes the disadvantages with traditional methods in molecular biology, which generally work on a “one gene in one experiment” basis, resulting in low throughput and the inability to appreciate the “whole picture” of gene function. In the context of the products and methods of the present disclosure, array technology can be used, for example, in the analysis of the expression of biomarker proteins or mRNA.

[1407] In general, any library or group of samples may be arranged in an orderly manner into an array, by spatially separating the members of the library or group. Examples of suitable libraries for arraying include nucleic acid libraries (including DNA, cDNA, oligonucleotide, etc. libraries), peptide, polypeptide and protein libraries, as well as libraries comprising any molecules, such as ligand libraries, among others. Accordingly, where reference is made to a “library” in this document, unless the context dictates otherwise, such reference should be taken to include reference to a library in the form of an array.

[1408] Proteins, polypeptides, etc., may also be immobilised in arrays. For example, antibodies have been used in microarray analysis of the proteome using protein chips (Borrebaeck C A, 2000, Immunol Today 21(8):379-82). Polypeptide arrays are reviewed in, for example, MacBeath and Schreiber, 2000, Science, 289(5485):1760-1763.

[1409] Sample

[1410] Suitable samples include, but are not limited to, tissue samples such as tissue biopsy, blood, urine, buccal scrapes etc., as well as serum, plasma, or tissue culture supernatant samples. In preferred embodiments the expression or amount of the one or more biomarker is assessed by determining the level of protein expression in the sample. In some preferred embodiments the sample is a blood, serum, or plasma sample. In some particularly preferred embodiments the sample is a serum sample.

[1411] When assessing the expression or amount of the one or more biomarker proteins or mRNA in serum or plasma samples derived from a subject, samples are removed and subjected to analytical techniques such as flow cytometry, mass cytometry (CyTOF), ELISA, PET, and SELDI-TOF MS. In some embodiments, the method may comprise extracting RNA from said sample and detecting gene expression by QPCR. In some other embodiments, gene expression may be detected by detecting protein products by, for example, Western Blot.

[1412] In some embodiments, the level of expression of the one or more biomarker is assessed by determining the copy number of the gene encoding the one or more biomarker. Copy number (i.e. gene duplication events) may be determined using standard techniques known in the art, e.g. using a DNA chip as described in Jiang et al. (Jiang Q, Ho Y Y, Hao L, Nichols Berrios C, Chakravarti A. Copy number variants in candidate genes are genetic modifiers of Hirschsprung disease. PLoS One. 2011; 6(6)).

[1413] Is some preferred embodiments of the predictive methods described herein, the method is performed in vitro or ex vivo.

[1414] Methods of Selecting a Subject for Treatment

[1415] A third aspect of this facet of the present disclosure relates to methods of selecting subjects having, suspected of having, or diagnosed with acute myelocytic leukemia (AML) or myelodysplastic syndrome (MDS) for treatment with an agent capable of inhibiting or reversing EMT or a chemotherapeutic agent. In some embodiments the method comprises: identifying subjects susceptible to treatment with an agent capable of inhibiting or reversing EMT or a chemotherapeutic agent using a predictive method defined in accordance with the above described first and second aspects of this facet of the disclosure; and, selecting thus identified subjects for treatment.

[1416] In some embodiments this aspect relates to methods of selecting subjects having, suspected of having, or diagnosed with acute myelocytic leukemia (AML) or myelodysplastic syndrome (MDS) for continued treatment with an agent capable of inhibiting or reversing EMT or a chemotherapeutic agent. In some embodiments the method comprises: identifying subjects susceptible to treatment with an agent capable of inhibiting or reversing EMT or a chemotherapeutic agent using a predictive method defined in accordance with the above described second aspect of this facet of the disclosure; and, selecting thus identified subjects for treatment.

[1417] In some embodiments of this aspect of the disclosure, the treatment comprises administering to the subject a therapeutically effective amount of an agent capable of inhibiting or reversing EMT or a chemotherapeutic agent as described herein. Accordingly, in some embodiments the treatment comprises an Axl inhibitor, Akt3 inhibitor, Slfn11 inhibitor, or PHGDH inhibitor. In some preferred embodiments the treatment comprises an Axl inhibitor, for example, BGB324/R428/bemcentinib, cabozantinib, TP-0903, foretinib, merestinib, bosutinib, gilteritinib, crizotinib, amuvatinib, sunitinib, sitravatinib, LDC1267, or UNC2025. Other Axl inhibitors include the anti-Axl antibodies described in WO2015/193428, WO2015/193430, WO2016/097370, and WO2016/166296. In some preferred embodiments the Axl inhibitor is an anti-Axl antibody described in WO2015/193428, WO2015/193430, WO2016/097370, or WO2016/166296. In some particularly preferred embodiments the Axl inhibitor is BGB324/R428/bemcentinib.

[1418] In some other preferred embodiments, the treatment comprises an Akt3 inhibitor. In some embodiments the Akt3 inhibitor is an Akt3 inhibitor disclosed in WO2016/102672.

[1419] In some embodiments of this aspect of the disclosure, the treatment is administered as a single agent. In other embodiments, the treatment is administered in combination with a further cancer treatment. Suitable further cancer treatments are outlined in detail above. In some embodiments the further cancer treatment is a pyrimidine analogue, for example azacitidine, capecitabine, cytarabine, edatrexate, floxuridine, fluorouracil, gemcitabine, or troxacitabine, or a cytidine analogue, for example decitabine. In some particularly preferred embodiments the further cancer treatment is cytarabine. In other particularly preferred embodiments the further cancer treatment is decitabine.

[1420] Kits

[1421] A fourth aspect of this facet of the present disclosure relates to diagnostic kits and test devices. In some embodiments the disclosure provides a diagnostic kit comprising 1, 2, 3, 4, 5, 6, 7, 8, 9, 10 or more reagents for detecting the activity, expression, or amount of one or more of the biomarkers described herein, each of which is selective for a particular biomarker. In some embodiments each of the reagents for detecting is selective for a biomarker selected from the group consisting of: VDBP, THP, EpCam, EGFR, Fetuin-A, IL-6R beta, Axl, CFHR1, GDF-15, MSP, PON-1, insulin (C-peptide), and/or Apo A-II.

[1422] In other embodiments the disclosure provides a test device comprising 1, 2, 3, 4, 5, 6, 7, 8, 9, 10 or more reagents for detecting the activity, expression, or amount of one or more of the biomarkers described herein, each of which is selective for a particular biomarker. In some embodiments each of the reagents for detecting is selective for a biomarker selected from the group consisting of: VDBP, THP, EpCam, EGFR, Fetuin-A, IL-6R beta, Axl, CFHR1, GDF-15, MSP, PON-1, insulin (C-peptide), and/or Apo A-II.

[1423] In some embodiments the diagnostic kit or test device comprises 1, 2, 3, 4, 5, 6, 7, 8, 9, 10 or more specific binding members, each of which selectively binds to one of the biomarkers described herein; and, one or more reagents for detecting said one or more specific binding members, or one or more reagents for detecting and/or quantifying formation of a complex formed by said specific binding member and said biomarker. In some embodiments each specific binding member selectively binds to a biomarker selected from the group consisting of: VDBP, THP, EpCam, EGFR, Fetuin-A, IL-6R beta, Axl, CFHR1, GDF-15, MSP, PON-1, insulin (C-peptide), and/or Apo A-II.

[1424] In some embodiments the diagnostic kit or test device comprises a specific binding member which selectively binds to Axl, and at least 1, 2, 3, 4, 5, 6, 7, 8, 9, 10, or more specific binding members, each of which selectively binds to a biomarker selected from the group consisting of: VDBP, THP, EpCam, EGFR, Fetuin-A, IL-6R beta, Axl, CFHR1, GDF-15, MSP, PON-1, insulin (C-peptide), and/or Apo A-II.

[1425] In some embodiments of this aspect of the disclosure the diagnostic kit or test device comprises a plurality of said specific binding members provided in the form of an array on a substrate or conjugated to a plurality of particles, such as beads or microspheres. The particles may be encoded with a detectable label. In some embodiments the specific binding member comprises an antibody molecule or a binding fragment thereof.

[1426] In some embodiments of the diagnostic kit or test device detecting formation of a complex formed by a specific binding member and a biomarker is carried out by use of a technique selected from: Western blot; enzyme-linked immunosorbent assay (ELISA); radioimmunoassay (RIA); competitive enzyme immunoassay; double antibody sandwich ELISA (DAS-ELISA); liquid immunoarray technology; immunocytochemistry; immunohistochemistry; antibody microarray detection; precipitation of colloidal gold; affinity chromatography; ligand binding assay; and lectin binding assay.

[1427] In some embodiments of the diagnostic kit or test device, the kit or test device comprises no more than 15, 20, 25, 30, 40, or 50 reagents for detecting. In some embodiments of the diagnostic kit or test device, the kit or test device comprises no more than 15, 20, 25, 30, 40, or 50 specific binding members.

[1428] The present disclosure also provides use of such diagnostic kits and test devices in methods of predicting a cancer-related outcome in a subject. In preferred embodiments the cancer-related outcome is susceptibility to treatment with an agent capable of inhibiting or reversing EMT or a chemotherapeutic agent as described herein.

[1429] In some embodiments the agent capable of inhibiting or reversing EMT or chemotherapeutic agent is an Axl inhibitor, Akt3 inhibitor, Slfn11 inhibitor, or PHGDH inhibitor. In some preferred embodiments the agent capable of inhibiting or reversing EMT or chemotherapeutic agent is an Axl inhibitor, for example BGB324/R428/bemcentinib, cabozantinib, TP-0903, foretinib, merestinib, bosutinib, gilteritinib, crizotinib, amuvatinib, sunitinib, sitravatinib, LDC1267, or UNC2025. Other Axl inhibitors include the anti-Axl antibodies described in WO2015/193428, WO2015/193430, WO2016/097370, and WO2016/166296.

[1430] In some preferred embodiments the Axl inhibitor is an anti-Axl antibody described in WO2015/193428, WO2015/193430, WO2016/097370, or WO2016/166296. In some particularly preferred embodiments the Axl inhibitor is BGB324/R428/bemcentinib.

[1431] In some embodiments of the diagnostic kit or test device for use in a predictive method, the subject has, is suspected of having, or has been diagnosed with AML or MDS.

[1432] In some embodiments the method may be as defined in accordance with the above described first and second aspects of this facet of the disclosure.

[1433] A fifth aspect of this facet of the present disclosure relates to the use of a reagent for detecting the activity, expression, or amount of a biomarker selected from the group consisting of: VDBP, THP, EpCam, EGFR, Fetuin-A, IL-6R beta, Axl, CFHR1, GDF-15, MSP, PON-1, insulin (C-peptide), and/or Apo A-II, in a method of predicting a cancer-related outcome in a subject.

[1434] A sixth aspect of this facet of the disclosure relates to the use of 1, 2, 3, 4, 5, 6, 7, 8, 9, 10 or more reagents for detecting the activity, expression, or amount a biomarker, each of which is selective for a particular biomarker selected from the group consisting of: VDBP, THP, EpCam, EGFR, Fetuin-A, IL-6R beta, Axl, CFHR1, GDF-15, MSP, PON-1, insulin (C-peptide), and/or Apo A-II, in a method of manufacture of a diagnostic kit or test device for use in a method of predicting a cancer-related outcome in a subject. In some embodiments of these uses the reagent for detecting comprises a specific binding member selective for a particular biomarker. The specific binding member may comprise an antibody molecule or a binding fragment thereof.

[1435] In some embodiments the method may be as defined in accordance with the above described first and second aspects of this facet of the disclosure.

[1436] Uses

[1437] A seventh aspect of this facet of the present disclosure relates to the use of one or more of: VDBP, THP, EpCam, EGFR, Fetuin-A, IL-6R beta, Axl, CFHR1, GDF-15, MSP, PON-1, insulin (C-peptide), and/or Apo A-II, as a biomarker for determining if a subject is susceptible to treatment with an agent capable of inhibiting or reversing EMT or a chemotherapeutic agent.

[1438] In some embodiments the use relates to use of Axl, and at least 1, 2, 3, 4, 5, 6, 7, 8, 9, 10, or more of: VDBP, THP, EpCam, EGFR, Fetuin-A, IL-6R beta, Axl, CFHR1, GDF-15, MSP, PON-1, insulin (C-peptide), and/or Apo A-II, as a biomarker for determining if a subject is susceptible to treatment with an agent capable of inhibiting or reversing EMT or a chemotherapeutic agent.

[1439] In some embodiments the use is as a biomarker in a method as defined in accordance with the above described first and second aspects of this facet of the disclosure.

[1440] Methods of Treating a Subject

[1441] A eighth aspect of this facet of the present disclosure relates to methods of treating a subject having, suspected of having, or diagnosed with acute myelocytic leukemia (AML) or myelodysplastic syndrome (MDS). In some embodiments the method comprises: identifying a subject for treatment using a predictive method defined in accordance with the above described first and second aspects of this facet of the disclosure; and, administering to the subject a therapeutically effective amount of an agent capable of inhibiting or reversing EMT or a chemotherapeutic agent.

[1442] Accordingly, in some embodiments, the method comprises: (a) obtaining a sample from the subject; (b) determining if the subject is susceptible to treatment with an agent capable of inhibiting or reversing EMT or a chemotherapeutic agent using a predictive method defined in accordance with the above described first and aspects of this facet of the disclosure; and, (c) administering to the subject a therapeutically effective amount of an agent capable of inhibiting or reversing EMT or a chemotherapeutic agent.

[1443] In some embodiments the method comprises administering a therapeutically effective amount of an agent capable of inhibiting or reversing EMT or chemotherapeutic agent to a subject identified as susceptible to said treatment using a predictive method defined in accordance with the above described first and second aspect of this facets of the disclosure.

[1444] In other embodiments the method comprises: (a) administering to a subject a therapeutically effective amount of an agent capable of inhibiting or reversing EMT or a chemotherapeutic agent; and, (b) determining if the subject is susceptible to said treatment using a predictive method defined in accordance with the above described second aspect of this facet of the disclosure. In some embodiments the method further comprises: (c) administering to the subject one or more further therapeutically effective amounts of an agent capable of inhibiting or reversing EMT or a chemotherapeutic agent provided that the subject is identified as susceptible to said treatment.

[1445] A ninth aspect of this facet of the present disclosure relates to an agent capable of inhibiting or reversing EMT or chemotherapeutic agent for use in a method of treating a subject having, suspected of having, or diagnosed with acute myelocytic leukemia (AML) or myelodysplastic syndrome (MDS). In some embodiments the method of treatment is a method as defined above.

[1446] A tenth aspect of this facet of the present disclosure relates to use of an agent capable of inhibiting or reversing EMT or chemotherapeutic agent for use in a method of manufacture of a medicament for use in a method of treating a subject having, suspected of having, or diagnosed with acute myelocytic leukemia (AML) or myelodysplastic syndrome (MDS). In some embodiments the method of treatment is a method as defined above.

[1447] In some embodiments of these methods, agents for use, or uses, the agent capable of inhibiting or reversing EMT or chemotherapeutic agent comprises an Axl inhibitor, Akt3 inhibitor, Slfn11 inhibitor, or PHGDH inhibitor. In some preferred embodiments the agent capable of inhibiting or reversing EMT or chemotherapeutic agent is an Axl inhibitor, for example BGB324/R428/bemcentinib, cabozantinib, TP-0903, foretinib, merestinib, bosutinib, gilteritinib, crizotinib, amuvatinib, sunitinib, sitravatinib, LDC1267, or UNC2025. Other Axl inhibitors include the anti-Axl antibodies described in WO2015/193428, WO2015/193430, WO2016/097370, and WO2016/166296. In some preferred embodiments the Axl inhibitor is an anti-Axl antibody described in WO2015/193428, WO2015/193430, WO2016/097370, or WO2016/166296. In some particularly preferred embodiments the Axl inhibitor is BGB324/R428/bemcentinib.

[1448] In some other preferred embodiments, the treatment comprises an Akt3 inhibitor. In some embodiments the Akt3 inhibitor is an Akt3 inhibitor disclosed in WO2016/102672.

[1449] In some embodiments of these methods, agents for use, or uses, the treatment is administered as a single agent. In other embodiments, the treatment is administered in combination with a further cancer treatment. Suitable further cancer treatments are outlined in detail above. In some embodiments the further cancer treatment is a pyrimidine analogue, for example azacitidine, capecitabine, cytarabine, edatrexate, floxuridine, fluorouracil, gemcitabine, or troxacitabine, or a cytidine analogue, for example decitabine. In some particularly preferred embodiments the further cancer treatment is cytarabine. In other particularly preferred embodiments the further cancer treatment is decitabine.

[1450] Statements of Disclosure

[1451] The following numbered statements relate to aspects of this facet of the present disclosure, and form part of the description:
[1452] 101. A method of predicting a cancer-related outcome in a subject, the method comprising assessing the activity, expression, or amount of one or more biomarker in the subject, or in a sample derived from the subject;
   [1453] wherein the one or more biomarker is selected from the group consisting of: VDBP, THP, EpCam, EGFR, Fetuin-A, IL-6R beta, Axl, CFHR1, GDF-15, MSP, PON-1, insulin (C-peptide), and/or Apo A-II; and
   [1454] wherein the subject has, is suspected of having, or has been diagnosed with acute myelocytic leukemia (AML) or myelodysplastic syndrome (MDS).
[1455] 102. A method according to statement 101, wherein the method comprises:
   [1456] assessing the activity, expression, or amount of one or more biomarker in the subject, or in a sample derived from the subject, to obtain a sample profile of the one or more biomarker; and
   [1457] making a prediction based on the sample profile of the one or more biomarker.
[1458] 103. A method according to statement 102, wherein the prediction is made by comparing the sample profile to a control profile.
[1459] 104. A method according to statement 103, wherein the sample profile is obtained before the subject is contacted with or administered an agent capable of inhibiting or reversing EMT or a chemotherapeutic agent.
[1460] 105. A method according to statement 104, wherein the control profile is:
   [1461] (i) obtained from a population of control subjects having AML or MDS; or
   [1462] (ii) obtained from a control subject or population of control subjects having AML or MDS and previously found to lack susceptibility to treatment with an agent capable of inhibiting or reversing EMT or a chemotherapeutic agent (that is, non-responder subjects);
   [1463] (iii) a predetermined profile of biomarker expression, activity, or amount values, for example a profile of “average, median, or mean” values or “standard ranges” of values, obtained from a control subject or population of control subjects having AML or MDS and previously found to lack susceptibility to treatment with an agent capable of inhibiting or reversing EMT or a chemotherapeutic agent (that is, non-responder subjects);
   [1464] (iv) obtained from a control sample having a known “average, median, or mean” value of biomarkers indicative of a control subject or population of control subjects having AML or MDS and previously found to lack susceptibility to treatment with an agent capable of inhibiting or reversing EMT or a chemotherapeutic agent (that is, non-responder subjects);
   [1465] (v) a predetermined profile of biomarker expression, activity, or amount “threshold” values obtained from a control subject or population of control subjects having AML or MDS and previously found to be susceptible to treatment with an agent capable of inhibiting or reversing EMT or a chemotherapeutic agent (that is, responder subjects); or
   [1466] (vi) obtained from a control sample having a known “threshold” value of biomarkers indicative of a control subject or population of control subjects having AML or MDS and previously found to be susceptible to treatment with an agent capable of inhibiting or reversing EMT or a chemotherapeutic agent (that is, responder subjects).
[1467] 106. A method according to statement 105, wherein a higher activity, expression, or amount of one or more biomarker in the sample profile as compared with the control profile is indicative of susceptibility to treatment with an agent capable of inhibiting or reversing EMT or a chemotherapeutic agent.
[1468] 107. A method according to statement 105, wherein a lower activity, expression, or amount of one or more biomarker in the sample profile as compared with the control profile is indicative of susceptibility to treatment with an agent capable of inhibiting or reversing EMT or a chemotherapeutic agent.
[1469] 108. A method according to any one of statements 105-107, wherein the one or more biomarker includes at least one of: VDBP, THP, EpCam, EGFR, Fetuin-A, IL-6R beta, MSP, PON-1, and/or Apo A-II,
   [1470] and wherein a higher activity, expression, or amount of one or more of said biomarkers in the sample profile as compared with the control profile is indicative of susceptibility to treatment with an agent capable of inhibiting or reversing EMT or a chemotherapeutic agent.
[1471] 109. A method according to any one of statements 105-108, wherein the one or more biomarker includes at least one of: Axl, GDF-15, Insulin (c-peptide) and/or CFHR1,
   [1472] and wherein a lower activity, expression, or amount of one or more of said biomarkers in the sample profile as compared with the control profile is indicative of susceptibility to treatment with an agent capable of inhibiting or reversing EMT or a chemotherapeutic agent.
[1473] 110. A method according to any one of statements 105-109, wherein:
   [1474] a lower activity, expression, or amount of Axl; and/or
   [1475] a lower activity, expression, or amount of GDF-15; and/or
   [1476] a lower activity, expression, or amount of Insulin (c-peptide); and/or
   [1477] a lower activity, expression, or amount of CHFR1; and/or
   [1478] a higher activity, expression, or amount of THP; and/or
   [1479] a higher activity, expression, or amount of VDBP; and/or
   [1480] a higher activity, expression, or amount of EpCam; and/or
   [1481] a higher activity, expression, or amount of EGFR; and/or
   [1482] a higher activity, expression, or amount of Fetuin-A; and/or
   [1483] a higher activity, expression, or amount of IL-6R beta; and/or
   [1484] a higher activity, expression, or amount of MSP; and/or
   [1485] a higher activity, expression, or amount of PON-1; and/or
   [1486] a higher activity, expression, or amount of Apo-AII;
   [1487] in the sample profile as compared with the control profile is indicative of susceptibility to treatment with an agent capable of inhibiting or reversing EMT or a chemotherapeutic agent.
[1488] 111. A method according to any one of statements 101-110, wherein the one or more biomarker comprises Axl,
   [1489] optionally wherein the one or more biomarker comprises Axl and at least 1, 2, 3, 4, 5, 6, 7, 8, 9, 10, or more further biomarkers selected from: VDBP, THP, EpCam, EGFR, Fetuin-A, IL-6R beta, CFHR1, GDF-15, MSP, PON-1, insulin (C-peptide), and/or Apo A-II.
[1490] 112. A method according to any one of statements 101-110, wherein the one or more biomarker comprises VDBP,
   [1491] optionally wherein the one or more biomarker comprises VDBP and at least 1, 2, 3, 4, 5, 6, 7, 8, 9, 10, or more further biomarkers selected from: THP, EpCam, EGFR, Fetuin-A, IL-6R beta, Axl, CFHR1, GDF-15, MSP, PON-1, insulin (C-peptide), and/or Apo A-II.
[1492] 113. A method according to any one of statements 101-110, wherein the one or more biomarker comprises THP,
   [1493] optionally wherein the one or more biomarker comprises THP and at least 1, 2, 3, 4, 5, 6, 7, 8, 9, 10, or more further biomarkers selected from: VDBP, EpCam, EGFR, Fetuin-A, IL-6R beta, Axl, CFHR1, GDF-15, MSP, PON-1, insulin (C-peptide), and/or Apo A-II.
[1494] 114. A method according to any one of statements 101-110, wherein the one or more biomarker comprises EpCam,
   [1495] optionally wherein the one or more biomarker comprises EpCam and at least 1, 2, 3, 4, 5, 6, 7, 8, 9, 10, or more further biomarkers selected from: VDBP, THP, EGFR, Fetuin-A, IL-6R beta, Axl, CFHR1, GDF-15, MSP, PON-1, insulin (C-peptide), and/or Apo A-II.
[1496] 115. A method according to any one of statements 101-110, wherein the one or more biomarker comprises VDBP and THP,
   [1497] optionally wherein the one or more biomarker comprises VDBP, THP, and at least 1, 2, 3, 4, 5, 6, 7, 8, 9, 10, or more further biomarkers selected from: EpCam, EGFR, Fetuin-A, IL-6R beta, Axl, CFHR1, GDF-15, MSP, PON-1, insulin (C-peptide), and/or Apo A-II.
[1498] 116. A method according to any one of statements 101-110, wherein the one or more biomarker comprises VDBP and EpCam,
   [1499] optionally wherein the one or more biomarker comprises VDBP, EpCam, and at least 1, 2, 3, 4, 5, 6, 7, 8, 9, 10, or more further biomarkers selected from: THP, EGFR, Fetuin-A, IL-6R beta, Axl, CFHR1, GDF-15, MSP, PON-1, insulin (C-peptide), and/or Apo A-II.
[1500] 117. A method according to any one of statements 101-110, wherein the one or more biomarker comprises EpCam and THP,
   [1501] optionally wherein the one or more biomarker comprises EpCam, THP, and at least 1, 2, 3, 4, 5, 6, 7, 8, 9, 10, or more further biomarkers selected from: VDBP, EGFR, Fetuin-A, IL-6R beta, Axl, CFHR1, GDF-15, MSP, PON-1, insulin (C-peptide), and/or Apo A-II.
[1502] 118. A method according to any one of statements 101-110, wherein the one or more biomarker comprises VDBP, THP, and EpCam,
   [1503] optionally wherein the one or more biomarker comprises VDBP, THP, EpCam, and at least 1, 2, 3, 4, 5, 6, 7, 8, 9, 10, or more further biomarkers selected from: EGFR, Fetuin-A, IL-6R beta, Axl, CFHR1, GDF-15, MSP, PON-1, insulin (C-peptide), and/or Apo A-II.
[1504] 119. A method according to any one of statements 112-118, wherein the one or more biomarker further comprises Axl.
[1505] 120. A method according to any one of statements 101-119, wherein:
   [1506] the Axl biomarker comprises an amino acid sequence having at least 70%, 80%, 90%, 95%, 99% or 100% sequence identity with the full-length of the amino acid sequence disclosed at UniProt accession no: P30530-1 or P30530-2 (entry version 196) or a fragment thereof;
   [1507] the Tamm-Horsfall Urinary Glycoprotein (THP) biomarker comprises an amino acid sequence having at least 70%, 80%, 90%, 95%, 99% or 100% sequence identity with the full-length of the amino acid sequence disclosed at UniProt accession no: P07911-1, P07911-2, P07911-3, P07911-4, or P07911-5 (entry version 182) or a fragment thereof;
   [1508] the Vitamin D-Binding Protein (VDBP) biomarker comprises an amino acid sequence having at least 70%, 80%, 90%, 95%, 99% or 100% sequence identity with the full-length of the amino acid sequence disclosed at UniProt accession no: P02774-1, P02774-2, or P02774-3 (entry version 201) or a fragment thereof;
   [1509] the Epithelial cell adhesion molecule (EpCam) biomarker comprises an amino acid sequence having at least 70%, 80%, 90%, 95%, 99% or 100% sequence identity with the full-length of the amino acid sequence disclosed at UniProt accession no: P16422-1 (entry version 186) or a fragment thereof;
   [1510] the Epidermal Growth Factor Receptor (EGFR) biomarker comprises an amino acid sequence having at least 70%, 80%, 90%, 95%, 99% or 100% sequence identity with the full-length of the amino acid sequence disclosed at UniProt accession no: Q504U8 (entry version 138) or a fragment thereof;
   [1511] the Fetuin-A biomarker comprises an amino acid sequence having at least 70%, 80%, 90%, 95%, 99% or 100% sequence identity with the full-length of the amino acid sequence disclosed at UniProt accession no: P02765-1 (entry version 205) or a fragment thereof;
   [1512] the Interleukin-6 receptor subunit beta (IL-6R beta) biomarker comprises an amino acid sequence having at least 70%, 80%, 90%, 95%, 99% or 100% sequence identity with the full-length of the amino acid sequence disclosed at UniProt accession no: P08887-1 or P08887-2 (entry version 210) or a fragment thereof;
   [1513] the Complement Factor H-Related Protein 1 (CFHR1) biomarker comprises an amino acid sequence having at least 70%, 80%, 90%, 95%, 99% or 100% sequence identity with the full-length of the amino acid sequence disclosed at UniProt accession no: Q03591-1 (entry version 162) or a fragment thereof;
   [1514] the Growth/differentiation factor 15 (GDF-15) biomarker comprises an amino acid sequence having at least 70%, 80%, 90%, 95%, 99% or 100% sequence identity with the full-length of the amino acid sequence disclosed at UniProt accession no: Q03591-1 (entry version 165) or a fragment thereof;
   [1515] the Macrophage-Stimulating Protein (MSP) biomarker comprises an amino acid sequence having at least 70%, 80%, 90%, 95%, 99% or 100% sequence identity with the full-length of the amino acid sequence disclosed at UniProt accession no: P26927 (entry version 179) or a fragment thereof;
   [1516] the Paraoxonase-1 (PON-1) biomarker comprises an amino acid sequence having at least 70%, 80%, 90%, 95%, 99% or 100% sequence identity with the full-length of the amino acid sequence disclosed at UniProt accession no: P27169-1 (entry version 202) or a fragment thereof;
   [1517] the insulin (C-peptide) biomarker comprises an amino acid sequence having at least 70%, 80%, 90%, 95%, 99% or 100% sequence identity with the full-length of the amino acid sequence disclosed at UniProt accession no: P01308-1 (entry version 245), F8WCM5-1 (entry version 57) or a fragment thereof; and/or
   [1518] the Apolipoprotein A-II (Apo A-II) biomarker comprises an amino acid sequence having at least 70%, 80%, 90%, 95%, 99% or 100% sequence identity with the full-length of the amino acid sequence disclosed at UniProt accession no: P01871-1 or P01871-2 (entry version 180) or a fragment thereof.
[1519] 121. A method according to any one of statement 101-120, wherein the method comprises determining the amount of at least 2, 3, 4, 5, 6, 7, 8, 9, 10, 11, 12, 13, 14, 15, 20 of said biomarkers in the subject, or sample derived from the subject.
[1520] 122. A method according to any one of statements 104-121, wherein assessing the activity, expression, or amount of one or more biomarker in the subject, or in a sample derived from the subject, comprises:
   [1521] contacting a sample, or an extract from the sample, with at least 1, 2, 3, 4, 5, 6, 7, 8, 9, 10 or more reagents for detecting the activity, expression, or amount of one or more biomarkers, each of which is selective for a particular biomarker; and
   [1522] detecting and/or quantifying said reagents for detecting.
[1523] 123. A method according to statement 122, wherein assessing the expression or amount of one or more biomarker in the subject, or in a sample derived from the subject, comprises:
   [1524] contacting a sample, or an extract from the sample, with at least 1, 2, 3, 4, 5, 6, 7, 8, 9, 10 or more specific binding members, each of which selectively binds to a respective biomarker protein or mRNA; and
   [1525] detecting and/or quantifying formation of complex formed by said specific binding member and said biomarker protein or mRNA.
[1526] 124. A method according to statement 123 wherein the specific binding member comprises an antibody molecule or binding fragment thereof.
[1527] 125. A method according to statement 123 or 124, wherein detecting formation of a complex formed by the specific binding member and the biomarker protein or mRNA is carried out by use of a technique selected from: Western blot; enzyme-linked immunosorbent assay (ELISA); radioimmunoassay (RIA); competitive enzyme immunoassay; double antibody sandwich ELISA (DAS-ELISA); liquid immunoarray technology; immunocytochemistry; immunohistochemistry; antibody microarray detection; precipitation of colloidal gold; affinity chromatography; ligand binding assay; and lectin binding assay.
[1528] 126. A method according to any one of statements 123-125 wherein the expression or amount of the one or more biomarker is determined as the absolute amount of the respective biomarker protein or mRNA in the sample.
[1529] 127. A method according to any one of statements 123-125 wherein the expression or amount of the one or more biomarker is determined as a relative amount of the respective biomarker protein or mRNA in the sample,
   [1530] optionally wherein the relative amount is determined relative to a reference protein or mRNA in the sample, the expression of which is not altered by AML or MDS.
[1531] 128. A method according to any one of statements 101-127, wherein the cancer-related outcome is susceptibility to treatment with an agent capable of inhibiting or reversing EMT or a chemotherapeutic agent.
[1532] 129. A method according to statement 128, wherein the agent capable of inhibiting or reversing EMT or chemotherapeutic agent is an Axl inhibitor, Akt3 inhibitor, Slfn11 inhibitor, or PHGDH inhibitor.
[1533] 130. A method according to statement 129, wherein the agent capable of inhibiting or reversing EMT or chemotherapeutic agent is an Axl inhibitor.
[1534] 131. A method according to statement 130, wherein the Axl inhibitor is BGB324/R428/bemcentinib, cabozantinib, TP-0903, foretinib, merestinib, bosutinib, gilteritinib, crizotinib, amuvatinib, sunitinib, sitravatinib, LDC1267, UNC2025, or an anti-Axl antibody described in WO2015/193428, WO2015/193430, WO2016/097370, or WO2016/166296.
[1535] 132. A method according to statement 131, wherein the Axl inhibitor is BGB324/R428/bemcentinib.
[1536] 133. A method according to statement 131, wherein the Axl inhibitor is an anti-Axl antibody described in WO2015/193428, WO2015/193430, WO2016/097370, or WO2016/166296.
[1537] 134. A method according to statement 129, wherein the agent capable of inhibiting or reversing EMT or chemotherapeutic agent is an Akt3 inhibitor.
[1538] 135. A method according to statement 134, wherein the Akt3 inhibitor is an Akt3 inhibitor disclosed in WO2016/102672.
[1539] 136. A method according to any one of statements 128-135, wherein the agent capable of inhibiting or reversing EMT is administered as a single agent.
[1540] 137. A method according to any one of statements 128-135, wherein the agent capable of inhibiting or reversing EMT is administered in combination with a further cancer treatment.
[1541] 138. A method according to statement 137, wherein the further cancer treatment is selected from:
   [1542] (i) alkylating agents, including alkyl sulfonates such as busulfan;
   [1543] (ii) nitrogen mustards such as chlorambucil, cyclophosphamide, estramustine, ifosfamide, mechlorethamine, melphalan, and uramustine;
   [1544] (iii) ethyleneimine derivatives such as thiotepa;
   [1545] (iv) nitrosoureas such as carmustine, lomustine, and streptozocin;
   [1546] (v) triazenes such as dacarbazine, procarbazine, and temozolamide;
   [1547] (vi) platinum compounds such as cisplatin, carboplatin, oxaliplatin, satraplatin, and picoplatin onnaplatin, tetraplatin, sprioplatin, iproplatin, chloro(diethylenediamino)-platinum (II) chloride, dichloro(ethylenediamino)-platinum (II), diamino(2-ethylmalonato)platinum (II), (1,2-diaminocyclohexane)malonatoplatinum (II), (4-carboxyphthalo)-(1,2-diaminocyclohexane)platinum (II), (1,2-diaminocyclohexane)-(isocitrato)platinum (II), and (1,2-diaminocyclohexane)-cis-(pyruvato)platinum (II);
   [1548] (vii) antimetabolites, including antifolates such as methotrexate, permetrexed, raltitrexed, and trimetrexate;
   [1549] (viii) pyrimidine analogues such as azacitidine, capecitabine, cytarabine, edatrexate, floxuridine, fluorouracil, gemcitabine, and troxacitabine;
   [1550] (ix) purine analogues such as cladribine, chlorodeoxyadenosine, clofarabine, fludarabine, mercaptopurine, pentostatin, and thioguanine;
   [1551] (x) natural products, including antitumor antibiotics such as bleomycin, dactinomycin, mithramycin, mitomycin, mitoxantrone, porfiromycin;
   [1552] (xi) anthracyclines such as daunorubicin, doxorubicin, epirubicin, idarubicin, and valrubicin;
   [1553] (xii) mitotic inhibitors such as the vinca alkaloids vinblastine, vinvesir, vincristine, vindesine, and vinorelbine;
   [1554] (xiii) enzymes such as L-asparaginase and PEG-L-asparaginase;
   [1555] (xiv) microtubule polymer stabilizers such as the taxanes paclitaxel and docetaxel;
   [1556] (xv) topoisomerase I inhibitors such as the camptothecins irinotecan and topotecan;
   [1557] (xvi) topoisomerase II inhibitors such as podophyllotoxin, amsacrine, etoposide, teniposide, losoxantrone and actinomycin;
   [1558] (xvii) hormones and hormone antagonists, including
      [1559] androgens such as fluoxymesterone and testolactone;
      [1560] antiandrogens such as bicalutamide, cyproterone, flutamide, and nilutamide;
      [1561] corticosteroids such as dexamethasone and prednisone;
      [1562] aromatase inhibitors such as aminoglutethimide, anastrozole, exemestane, formestane, and letrozole;
      [1563] estrogens such as diethylstilbestrol;
      [1564] antiestrogens such as fulvestrant, raloxifene, tamoxifen, and toremifine;
      [1565] luteinising hormone-releasing hormone (LHRH) agonists and antagonists such as abarelix, buserelin, goserelin, leuprolide, histrelin, desorelin, nafarelin acetate and triptorelin;
      [1566] progestins such as medroxyprogesterone acetate and megestrol acetate; and
      [1567] thyroid hormones such as levothyroxine and liothyronine;
   [1568] (xviii) PKB pathway inhibitors, including perifosine, enzastaurin hydrochloride, and triciribine;
   [1569] (xix) P13K inhibitors such as semaphore and SF1126, and MTOR inhibitors such as rapamycin and analogues;
   [1570] (xx) CDK inhibitors, including seliciclib, alvocidib, and 7-hydroxystaurosporine;
   [1571] (xxi) COX-2 inhibitors, including celecoxib;
   [1572] (xxii) HDAC inhibitiors, including trichostatin A, suberoylanilide hydroxamic acid, and chlamydocin;
   [1573] (xxiii) DNA methylase inhibitors, including temozolomide, and miscellaneous agents, including altretamine, arsenic trioxide, thalidomide, lenalidomide, gallium nitrate, levamisole, mitotane, hydroxyurea, octreotide, procarbazine, suramin, photodynamic compounds such as methoxsalen and sodium porfimer;
   [1574] (xxiv) proteasome inhibitors such as bortezomib;
   [1575] (xxv) molecular targeted therapy agents including: functional therapeutic agents, including gene therapy agents and antisense therapy agents;
   [1576] (xxvi) tyrosine kinase inhibitors such as erlotinib hydrochloride, gefitinib, imatinib mesylate, and semaxanib;
   [1577] (xxvii) Raf inhibitors such as sorafenib, and gene expression modulators such as the retinoids and rexinoids, for example adapalene, bexarotene, trans-retinoic acid, 9-cis-retinoic acid, and N-(4-hydroxyphenyl)retinamide;
   [1578] (xxviii) phenotype-directed therapy agents, including monoclonal antibodies such as pembrolizumab, alemtuzumab, bevacizumab, cetuximab, ibritumomab tiuxetan, rituximab, and trastuzumab, immunotoxins such as gemtuzumab ozogamicin, radioimmunoconjugates such as I-tositumobab;
   [1579] (xxix) cancer vaccines;
   [1580] (xxx) biologic therapy agents including: interferons such as interferon-[alpha]2a and interferon-[alpha]2b, and interleukins such as aldesleukin, denileukin diftitox, and oprelvekin;
   [1581] (xxxi) anticancer therapies involving the use of protective or adjunctive agents, including: cytoprotective agents such as amifostine, and dexrazoxane, phosphonates such as pamidronate and zoledronic acid, and stimulating factors such as epoetin, darbeopetin, filgrastim, PEG-filgrastim, and sargramostim;
   [1582] (xxxii) Axl inhibitors such as 1-(6,7-dihydro-5H-benzo[6,7]cyclohepta[1,2-c]pyridazin-3-yl)-N3-((7-(S)-pyrrolidin-1-yl)-6,7,8,9-tetrahydro-5H-benzo[7]annulene-2-yl)-1H-1,2,4-triazole-3,5-diamine; and/or
   [1583] (xxxiii) further combination chemotherapeutic regimens, such as combinations of carboplatin/paclitaxel, capecitabine/docetaxel, fluorauracil/levamisole, fluorauracil/leucovorin, methotrexate/leucovorin, and trastuzumab/paclitaxel, alone or in further combination with carboplatin.
[1584] 139. A method according to statement 137, wherein the further cancer treatment is a pyrimidine analogue, for example azacitidine, capecitabine, cytarabine, edatrexate, floxuridine, fluorouracil, gemcitabine, or troxacitabine, or a cytidine analogue, for example decitabine.
[1585] 140. A method according to statement 139, wherein the further cancer treatment is cytarabine.
[1586] 141. A method according to statement 139, wherein the further cancer treatment is decitabine.
[1587] 142. A method according to any one of statements 101-141, wherein the subject is mammalian.
[1588] 143. A method according to statement 142, wherein the subject is human.
[1589] 144. A method according to any one of statements 101-143, wherein the predictive method is performed before the subject receives a treatment or course of treatment for AML or MDS.
[1590] 145. A method according to any one of statement 101-144, wherein the predictive method is performed during or after a treatment or course of treatment for AML or MDS.
[1591] 146. A method according to any one of statements 101-143 or 145, wherein the subject has previously been treated with an agent capable of inhibiting or reversing EMT or a chemotherapeutic agent.
[1592] 147. A method according to statement 146, wherein the subject has previously been treated with an agent selected from: a PHGDH inhibitor, a Slfn11 inhibitor, an Axl inhibitor, or an Akt3 inhibitor.
[1593] 148. A method according to any one of statements 146-147, wherein the subject has previously been treated with an agent that is different to the agent capable of inhibiting or reversing EMT or chemotherapeutic agent for which the subject's susceptibility is being predicted.
[1594] 149. A method according to any one of statements 101-144, wherein the subject has not previously been treated with an agent capable of inhibiting or reversing EMT or a chemotherapeutic agent.
[1595] 150. A method according to statement 149, wherein the subject has not previously been treated with an Axl inhibitor.
[1596] 151. A method according to statement 149, wherein the subject has not previously been treated with an Akt3 inhibitor.
[1597] 152. A method according to any one of statements 101-151, wherein the sample is selected from: blood, serum, plasma, tissue biopsy, culture supernatant, or urine.
[1598] 153. A method according to statement 152, wherein the sample is a blood, serum, or plasma sample.
[1599] 154. A method according to statement 153, wherein the sample is a serum sample.
[1600] 155. A method according to any one of statements 104-154, wherein the method further comprises a subsequent step of assessing the activity, expression, or amount of one or more biomarker in the subject, in which a sample profile is obtained after contacting the subject with an agent capable of inhibiting or reversing EMT or a chemotherapeutic agent.
[1601] 156. A method according to statement 103, wherein the sample profile is obtained after contacting the subject with an agent capable of inhibiting or reversing EMT or a chemotherapeutic agent.
[1602] 157. A method according to statement 155 or 156, wherein the control profile is obtained from the same subject prior to contacting said subject with the agent capable of inhibiting or reversing EMT or a chemotherapeutic agent.
[1603] 158. A method according to statement 157, wherein an increase in the activity, expression, or amount of one or more biomarker in the sample profile as compared with the control profile is indicative of higher susceptibility to treatment with an agent capable of inhibiting or reversing EMT or a chemotherapeutic agent.
[1604] 159. A method according to statement 157, wherein a decrease in the activity, expression, or amount of one or more biomarker in the sample profile as compared with the control profile is indicative of higher susceptibility to treatment with an agent capable of inhibiting or reversing EMT or a chemotherapeutic agent.
[1605] 160. A method according to statement 157, wherein an increase in the activity, expression, or amount of one or more biomarker in the sample profile as compared with the control profile is indicative of lower susceptibility to treatment with an agent capable of inhibiting or reversing EMT or a chemotherapeutic agent.
[1606] 161. A method according to statement 157, wherein a decrease in the activity, expression, or amount of one or more biomarker in the sample profile as compared with the control profile is indicative of lower susceptibility to treatment with an agent capable of inhibiting or reversing EMT or a chemotherapeutic agent.
[1607] 162. A method according to statement 158, wherein the one or more biomarker includes at least Axl.
[1608] 163. A method according to statement 158, wherein the one or more biomarker includes at least VDBP.
[1609] 164. A method according to statement 158, wherein the one or more biomarker includes at least THP.
[1610] 165. A method according to statement 158, wherein the one or more biomarker includes at least EpCam.
[1611] 166. A method according to statement 158, wherein the one or more biomarker includes at least VDBP and THP.
[1612] 167. A method according to statement 158, wherein the one or more biomarker includes at least VDBP and EpCam.
[1613] 168. A method according to statement 158, wherein the one or more biomarker includes at least THP and EpCam
[1614] 169. A method according to statement 158, wherein the one or more biomarker includes at least VDBP, THP, and EpCam.
[1615] 170. A method according to any one of statements 163-169, wherein the one or more biomarker further includes Axl.
[1616] 171. A method according to any one of statements 155-170, wherein assessing the activity, expression, or amount of one or more biomarker in the subject, or in a sample derived from the subject, comprises:
   [1617] contacting a sample, or an extract from the sample, with at least 1, 2, 3, 4, 5, 6, 7, 8, 9, 10 or more reagents for detecting the activity, expression, or amount of one or more biomarkers, each of which is selective for a particular biomarker; and
   [1618] detecting and/or quantifying said reagents for detecting.
[1619] 172. A method according to statement 171, wherein assessing the expression or amount of one or more biomarker in the subject, or in a sample derived from the subject, comprises:
   [1620] contacting a sample, or an extract from the sample, with at least 1, 2, 3, 4, 5, 6, 7, 8, 9, 10 or more specific binding members, each of which selectively binds to a respective biomarker protein or mRNA; and
   [1621] detecting and/or quantifying formation of a complex formed by said specific binding member and said biomarker protein or mRNA.
[1622] 173. A method according to statement 172, wherein the specific binding member comprises an antibody molecule or binding fragment thereof.
[1623] 174. A method according to statement 172 or 173, wherein detecting formation of a complex formed by the specific binding member and the biomarker protein or mRNA is carried out by use of a technique selected from: Western blot; enzyme-linked immunosorbent assay (ELISA); radioimmunoassay (RIA); competitive enzyme immunoassay; double antibody sandwich ELISA (DAS-ELISA); liquid immunoarray technology; immunocytochemistry; immunohistochemistry; antibody microarray detection; precipitation of colloidal gold; affinity chromatography; ligand binding assay; and lectin binding assay.
[1624] 175. A method according to any one of statements 172-174 wherein the expression or amount of the one or more biomarker is determined as the absolute amount of the respective biomarker protein or mRNA in the sample.
[1625] 176. A method according to any one of statements 172-174 wherein the expression or amount of the one or more biomarker is determined as a relative amount of the respective biomarker protein or mRNA in the sample,
   [1626] optionally wherein the relative amount is determined relative to a reference protein or mRNA in the sample, the expression of which is not altered by AML or MDS.
[1627] 177. A method according to any one of statements 156-176, wherein the agent capable of inhibiting or reversing EMT or chemotherapeutic agent is an Axl inhibitor, Akt3 inhibitor, Slfn11 inhibitor, or PHGDH inhibitor.
[1628] 178. A method according to statement 177, wherein the agent capable of inhibiting or reversing EMT or chemotherapeutic agent is an Axl inhibitor.
[1629] 179. A method according to statement 178, wherein the Axl inhibitor is BGB324/R428/bemcentinib, cabozantinib, TP-0903, foretinib, merestinib, bosutinib, gilteritinib, crizotinib, amuvatinib, sunitinib, sitravatinib, LDC1267, UNC2025, or an anti-Axl antibody described in WO2015/193428, WO2015/193430, WO2016/097370, or WO2016/166296.
[1630] 180. A method according to statement 179, wherein the Axl inhibitor is BGB324/R428/bemcentinib.
[1631] 181. A method according to statement 179, wherein the Axl inhibitor is an anti-Axl antibody described in WO2015/193428, WO2015/193430, WO2016/097370, or WO2016/166296.
[1632] 182. A method according to statement 177, wherein the agent capable of inhibiting or reversing EMT or chemotherapeutic agent is an Akt3 inhibitor.
[1633] 183. A method according to statement 182, wherein the Akt3 inhibitor is an Akt3 inhibitor disclosed in WO2016/102672.
[1634] 184. A method according to any one of statements 177-183, wherein the agent capable of inhibiting or reversing EMT is administered as a single agent.
[1635] 185. A method according to any one of statements 177-183, wherein the agent capable of inhibiting or reversing EMT is administered in combination with a further cancer treatment.
[1636] 186. A method according to statement 185, wherein the further cancer treatment is selected from the further cancer treatments listed in statement 138.
[1637] 187. A method according to statement 185, wherein the further cancer treatment is a pyrimidine analogue, for example azacitidine, capecitabine, cytarabine, edatrexate, floxuridine, fluorouracil, gemcitabine, or troxacitabine, or a cytidine analogue, for example decitabine.
[1638] 188. A method according to statement 187, wherein the further cancer treatment is cytarabine.
[1639] 189. A method according to statement 187, wherein the further cancer treatment is decitabine.
[1640] 190. A method according to any one of statements 156-189, wherein the subject is mammalian.
[1641] 191. A method according to statement 190, wherein the subject is human.
[1642] 192. A method according to any one of statements 156-191, wherein the subject was selected for treatment with the agent capable of inhibiting or reversing EMT or a chemotherapeutic agent, using a predictive method according to any one of statements 101-155.
[1643] 193. A method according to any one of statements 156-192, wherein the sample is selected from: blood, serum, plasma, tissue biopsy, culture supernatant, or urine.
[1644] 194. A method according to statement 193, wherein the sample is a blood, serum, or plasma sample.
[1645] 195. A method according to statement 194, wherein the sample is a serum sample.
[1646] 196. A method according to any one of statements 1-195, wherein the method is performed in vitro or ex vivo.
[1647] 201. A method of selecting subjects having, suspected of having, or diagnosed with acute myelocytic leukemia (AML) or myelodysplastic syndrome (MDS) for treatment with an agent capable of inhibiting or reversing EMT or a chemotherapeutic agent, the method comprising:
   [1648] identifying subjects susceptible to treatment with an agent capable of inhibiting or reversing EMT or a chemotherapeutic agent using a method according to any one of statements 101-196; and
   [1649] selecting thus identified subjects for treatment.
[1650] 202. A method of selecting subjects having, suspected of having, or diagnosed with acute myelocytic leukemia (AML) or myelodysplastic syndrome (MDS) for continued treatment with an agent capable of inhibiting or reversing EMT or a chemotherapeutic agent, the method comprising:
   [1651] identifying subjects susceptible to treatment with an agent capable of inhibiting or reversing EMT or a chemotherapeutic agent using a method according to any one of statements 156-196; and
   [1652] selecting thus identified subjects for treatment.
[1653] 203. A method according to any one of statements 201-202, wherein treatment comprises administering to the subject a therapeutically effective amount of an agent capable of inhibiting or reversing EMT or a chemotherapeutic agent.
[1654] 204. A method according to statement 203, wherein the treatment comprises an Axl inhibitor, Akt3 inhibitor, Slfn11 inhibitor, or PHGDH inhibitor.
[1655] 205. A method according to statement 204, wherein the treatment comprises an Axl inhibitor.
[1656] 206. A method according to statement 205, wherein the Axl inhibitor is BGB324/R428/bemcentinib, cabozantinib, TP-0903, foretinib, merestinib, bosutinib, gilteritinib, crizotinib, amuvatinib, sunitinib, sitravatinib, LDC1267, UNC2025, or an anti-Axl antibody described in WO2015/193428, WO2015/193430, WO2016/097370, or WO2016/166296.
[1657] 207. A method according to statement 206, wherein the Axl inhibitor is BGB324/R428/bemcentinib.
[1658] 208. A method according to statement 206, wherein the Axl inhibitor is an anti-Axl antibody described in WO2015/193428, WO2015/193430, WO2016/097370, or WO2016/166296.
[1659] 209. A method according to statement 204, wherein the treatment comprises an Akt3 inhibitor.
[1660] 210. A method according to statement 209, wherein the Akt3 inhibitor is an Akt3 inhibitor disclosed in WO2016/102672.
[1661] 211. A method according to any one of statements 203-210, wherein the treatment is administered as a single agent.
[1662] 212. A method according to any one of statements 203-211, wherein the treatment is administered in combination with a further cancer treatment.
[1663] 213. A method according to statement 212, wherein the further cancer treatment is selected from the further cancer treatments listed in statement 138.
[1664] 214. A method according to statement 212, wherein the further cancer treatment is a pyrimidine analogue, for example azacitidine, capecitabine, cytarabine, edatrexate, floxuridine, fluorouracil, gemcitabine, or troxacitabine, or a cytidine analogue, for example decitabine.
[1665] 215. A method according to statement 214, wherein the further cancer treatment is cytarabine.
[1666] 216. A method according to statement 214, wherein the further cancer treatment is decitabine.
[1667] 301. A diagnostic kit comprising 1, 2, 3, 4, 5, 6, 7, 8, 9, 10 or more reagents for detecting the activity, expression, or amount of one or more biomarkers, each of which is selective for a particular biomarker selected from the group consisting of: VDBP, THP, EpCam, EGFR, Fetuin-A, IL-6R beta, Axl, CFHR1, GDF-15, MSP, PON-1, insulin (C-peptide), and/or Apo A-II.
[1668] 302. A test device comprising 1, 2, 3, 4, 5, 6, 7, 8, 9, 10 or more reagents for detecting the activity, expression, or amount of one or more biomarkers, each of which is selective for a particular biomarker selected from the group consisting of: VDBP, THP, EpCam, EGFR, Fetuin-A, IL-6R beta, Axl, CFHR1, GDF-15, MSP, PON-1, insulin (C-peptide), and/or Apo A-II.
[1669] 303. A diagnostic kit or test device according to any one of statements 301 or 302, comprising:
[1670] 1, 2, 3, 4, 5, 6, 7, 8, 9, 10 or more specific binding members, each of which selectively binds to a biomarker selected from the group consisting of: VDBP, THP, EpCam, EGFR, Fetuin-A, IL-6R beta, Axl, CFHR1, GDF-15, MSP, PON-1, insulin (C-peptide), and/or Apo A-II; and
   [1671] one or more reagents for detecting said one or more specific binding members or one or more reagents for detecting and/or quantifying formation of a complex formed by said specific binding member and said biomarker.
[1672] 304. A diagnostic kit or test device according to statement 303, wherein the specific binding member comprises an antibody molecule or binding fragment thereof.
[1673] 305. A diagnostic kit or test device according to statement 303 or 304, wherein detecting formation of a complex formed by the specific binding member and the biomarker is carried out by use of a technique selected from: Western blot; enzyme-linked immunosorbent assay (ELISA); radioimmunoassay (RIA); competitive enzyme immunoassay; double antibody sandwich ELISA (DAS-ELISA); liquid immunoarray technology; immunocytochemistry; immunohistochemistry; antibody microarray detection; precipitation of colloidal gold; affinity chromatography; ligand binding assay; and lectin binding assay.
[1674] 306. A diagnostic kit or test device according to any one of statements 301-305, wherein the kit or test device comprises no more than 15, 20, 25, 30, 40, or 50 reagents for detecting.
[1675] 307. A diagnostic kit or test device according to any one of statements 301-306 for use in a method of predicting a cancer-related outcome in a subject.
[1676] 308. A diagnostic kit for use, or test device for use, according to statement 307, wherein the cancer-related outcome is susceptibility to treatment with an agent capable of inhibiting or reversing EMT or a chemotherapeutic agent.
[1677] 309. A diagnostic kit for use, or test device for use, according to statement 308, wherein the agent capable of inhibiting or reversing EMT or chemotherapeutic agent is an Axl inhibitor, Akt3 inhibitor, Slfn11 inhibitor, or PHGDH inhibitor.
[1678] 310. A diagnostic kit for use, or test device for use, according to statement 308, wherein the agent capable of inhibiting or reversing EMT or chemotherapeutic agent is an Axl inhibitor.
[1679] 311. A diagnostic kit for use, or test device for use, according to statement 310, wherein the Axl inhibitor is BGB324/R428/bemcentinib, cabozantinib, TP-0903, foretinib, merestinib, bosutinib, gilteritinib, crizotinib, amuvatinib, sunitinib, sitravatinib, LDC1267, UNC2025, or an anti-Axl antibody described in WO2015/193428, WO2015/193430, WO2016/097370, or WO2016/166296.
[1680] 312. A diagnostic kit for use, or test device for use, according to statement 311, wherein the Axl inhibitor is BGB324/R428/bemcentinib.
[1681] 313. A diagnostic kit for use, or test device for use, according to statement 311, wherein the Axl inhibitor is an anti-Axl antibody described in WO2015/193428, WO2015/193430, WO2016/097370, or WO2016/166296.
[1682] 314. A diagnostic kit for use, or test device for use, according to statement 308, wherein the agent capable of inhibiting or reversing EMT or chemotherapeutic agent is an Akt3 inhibitor.
[1683] 315. A diagnostic kit for use, or test device for use, according to any one of statements 307-310, wherein the subject has, is suspected of having, or has been diagnosed with acute myelocytic leukemia (AML) or myelodysplastic syndrome (MDS).
[1684] 316. A diagnostic kit for use, or test device for use, according to any one of statements 307-315, wherein the method is a method according to any one of statements 101-196.
[1685] 317. Use of a reagent for detecting the activity, expression, or amount of a biomarker selected from the group consisting of: VDBP, THP, EpCam, EGFR, Fetuin-A, IL-6R beta, Axl, CFHR1, GDF-15, MSP, PON-1, insulin (C-peptide), and/or Apo A-II, in a method of predicting a cancer-related outcome in a subject.
[1686] 318. Use of 1, 2, 3, 4, 5, 6, 7, 8, 9, 10 or more reagents for detecting the activity, expression, or amount a biomarker, each of which is selective for a particular biomarker selected from the group consisting of: VDBP, THP, EpCam, EGFR, Fetuin-A, IL-6R beta, Axl, CFHR1, GDF-15, MSP, PON-1, insulin (C-peptide), and/or Apo A-II, in a method of manufacture of a diagnostic kit or test device for use in a method of predicting a cancer-related outcome in a subject.
[1687] 319. A use according to statement 317 or 318, wherein the reagent for detecting comprises a specific binding member selective for a particular biomarker.
[1688] 320. A use according to statement 317 or 318, wherein the method of predicting a cancer-related outcome in a subject is a method according to any one of statements 101-196.
[1689] 401. Use of one or more of: VDBP, THP, EpCam, EGFR, Fetuin-A, IL-6R beta, Axl, CFHR1, GDF-15, MSP, PON-1, insulin (C-peptide), and/or Apo A-II, as a biomarker for determining if a subject is susceptible to treatment with an agent capable of inhibiting or reversing EMT or a chemotherapeutic agent.
[1690] 402. A use according to statement 401, wherein:
   [1691] (i) a higher activity, expression, or amount of one or more of said biomarkers in the subject, or sample derived from the subject, compared with a control profile for the respective biomarker is indicative of susceptibility to treatment with an agent capable of inhibiting or reversing EMT or a chemotherapeutic agent; or
   [1692] (ii) a lower activity, expression, or amount of one or more of said biomarkers in the subject, or sample derived from the subject, compared with a control profile for the respective biomarker is indicative of susceptibility to treatment with an agent capable of inhibiting or reversing EMT or a chemotherapeutic agent.
[1693] 403. A use according to statement 401, wherein:
   [1694] (i) an increase in the activity, expression, or amount of one or more biomarker relative to a control profile for the respective biomarker after contacting the subject with a cancer therapeutic agent is indicative of increased susceptibility to treatment with an agent capable of inhibiting or reversing EMT or a chemotherapeutic agent; or
   [1695] (ii) a decrease in the activity, expression, or amount of one or more biomarker relative to a control profile for the respective biomarker after contacting the subject with a cancer therapeutic agent is indicative of increased susceptibility to treatment with an agent capable of inhibiting or reversing EMT or a chemotherapeutic agent.
[1696] 404. A use according to any one of statements 401-403, wherein the use is as a biomarker in a method according to any one of statements 101-196
[1697] 501. A method of treating a subject having, suspected of having, or diagnosed with acute myelocytic leukemia (AML) or myelodysplastic syndrome (MDS), the method comprising:
   [1698] identifying a subject susceptible to treatment using a method according to any one of statements 101-196; and
   [1699] administering to the subject a therapeutically effective amount of an agent capable of inhibiting or reversing EMT or a chemotherapeutic agent.
[1700] 502. A method of treating a subject having, suspected of having, or diagnosed with acute myelocytic leukemia (AML) or myelodysplastic syndrome (MDS), the method comprising:
   [1701] (a) obtaining a sample from the subject;
   [1702] (b) determining if the subject is susceptible to treatment with an agent capable of inhibiting or reversing EMT or a chemotherapeutic agent using a method according to any one of statements 101-196;
   [1703] (c) administering to the subject a therapeutically effective amount of an agent capable of inhibiting or reversing EMT or a chemotherapeutic agent.
[1704] 503. A method of treating a subject having, suspected of having, or diagnosed with acute myelocytic leukemia (AML) or myelodysplastic syndrome (MDS), the method comprising administering a therapeutically effective amount of an agent capable of inhibiting or reversing EMT or chemotherapeutic agent to a subject identified as susceptible to said treatment using a method according to any one of statements 101-196.
[1705] 504. A method of treating a subject having, suspected of having, or diagnosed with acute myelocytic leukemia (AML) or myelodysplastic syndrome (MDS), the method comprising:
   [1706] administering to the subject a therapeutically effective amount of an agent capable of inhibiting or reversing EMT or a chemotherapeutic agent; and
   [1707] determining if the subject is susceptible to said treatment using a method according to any one of statements 156-196.
[1708] 505. A method according to statement 504, wherein the method comprises administering to the subject one or more further therapeutically effective amounts of an agent capable of inhibiting or reversing EMT or a chemotherapeutic agent provided that the subject is identified as susceptible to said treatment.
[1709] 506. An agent capable of inhibiting or reversing EMT or chemotherapeutic agent for use in a method of treating a subject having, suspected of having, or diagnosed with acute myelocytic leukemia (AML) or myelodysplastic syndrome (MDS),
   [1710] wherein the method is a method according to any one of statements 501-505.
[1711] 507. Use of an agent capable of inhibiting or reversing EMT or chemotherapeutic agent for use in a method of manufacture of a medicament for use in a method of treating a subject having, suspected of having, or diagnosed with acute myelocytic leukemia (AML) or myelodysplastic syndrome (MDS),
   [1712] wherein the method of treatment is a method according to any one of statements 501-505.
[1713] 508. A method, agent for use, or use according to any one of statements 501-507, wherein the agent capable of inhibiting or reversing EMT or chemotherapeutic agent comprises an Axl inhibitor, Akt3 inhibitor, Slfn11 inhibitor, or PHGDH inhibitor.
[1714] 509. A method, agent for use, or use according to statement 508, wherein the agent capable of inhibiting or reversing EMT or chemotherapeutic agent comprises an Axl inhibitor.
[1715] 510. A method, agent for use, or use according to statement 509, wherein the Axl inhibitor is BGB324/R428/bemcentinib, cabozantinib, TP-0903, foretinib, merestinib, bosutinib, gilteritinib, crizotinib, amuvatinib, sunitinib, sitravatinib, LDC1267, UNC2025, or an anti-Axl antibody described in WO2015/193428, WO2015/193430, WO2016/097370, or WO2016/166296.
[1716] 511. A method, agent for use, or use according to statement 510, wherein the Axl inhibitor is BGB324/R428/bemcentinib.
[1717] 512. A method, agent for use, or use according to statement 510, wherein the Axl inhibitor is an anti-Axl antibody described in WO2015/193428, WO2015/193430, WO2016/097370, or WO2016/166296.
[1718] 512. A method, agent for use, or use according to statement 508, wherein the agent capable of inhibiting or reversing EMT or chemotherapeutic agent comprises an Akt3 inhibitor.
[1719] 513. A method, agent for use, or use according to statement 512, wherein the Akt3 inhibitor is an Akt3 inhibitor disclosed in WO2016/102672.
[1720] 514. A method, agent for use, or use according to any one of statements 501-513, wherein the agent capable of inhibiting or reversing EMT or chemotherapeutic agent is administered as a single agent.
[1721] 515. A method, agent for use, or use according to any one of statements 501-513, wherein the agent capable of inhibiting or reversing EMT or chemotherapeutic agent is administered in combination with a further cancer treatment.
[1722] 516. A method, agent for use, or use according to statement 515, wherein the further cancer treatment is selected from the further cancer treatments listed in statement 130.
[1723] 517. A method, agent for use, or use according to statement 515, wherein the further cancer treatment is a pyrimidine analogue, for example azacitidine, capecitabine, cytarabine, edatrexate, floxuridine, fluorouracil, gemcitabine, or troxacitabine, or a cytidine analogue, for example decitabine.
[1724] 518. A method, agent for use, or use according to statement 517, wherein the further cancer treatment is cytarabine.
[1725] 519. A method, agent for use, or use according to statement 517, wherein the further cancer treatment is decitabine.

[1726] Facet 4: Melanoma

[1727] Melanoma, also known as malignant melanoma, is a class of cancer that develops from melanocytes. These cancers typically occur in the skin, but can also occur in the mouth, intestines, or eye. Chemotherapeutic drug therapies for melanoma include, for example ipilimumab, pembrolizumab, and nivolumab. The overall success rate of such treatments in metastatic melanoma remains limited, and there remains a need for targeted therapies for this cancer type (Hsueh et al, 2016).

[1728] Accordingly, robust biomarkers for predicting cancer-related outcomes in a subject having melanoma, for example susceptibility to treatment with an agent capable of inhibiting or reversing EMT or a chemotherapeutic agent, would be useful in identifying subjects who are most likely to respond to or benefit from treatment with a particular agent/regimen.

[1729] A “responder” subject as described herein is a subject who is likely to, or who does, respond to treatment (or benefit from treatment) with an agent capable of inhibiting or reversing EMT or a chemotherapeutic agent, for example the small molecule Axl kinase inhibitor BGB324/R428/bemcentinib when administered either as a single agent or in combination with another cancer treatment.

[1730] Correspondingly, a “non-responder” subject as described herein is a subject who is not likely to, or who does not, respond to treatment (or benefit from treatment) with an agent capable of inhibiting or reversing EMT or a chemotherapeutic agent, for example the small molecule Axl kinase inhibitor BGB324/R428/bemcentinib when administered either as a single agent or in combination with another cancer treatment.

[1731] To “respond to treatment” or “benefit from treatment” as used herein means to experience an overall clinical benefit from the treatment. This overall clinical benefit can be any of: prolonged survival, partial or complete disease remission, slowing or absence of disease progression, tumour shrinkage (for example, a reduction in tumour volume of 5, 10, 20, 30, 40% or more), reduction in tumour burden (for example, a reduction in tumour burden of 5, 10, 20, 30, 40% or more), slowing or absence of tumour enlargement, slowing or absence of increase in tumour burden, improved quality of life, progression-free survival, overall survival, or any other positive patient outcome. Suitable methods for determining tumour volume/burden are well known to the skilled person, for example, using: computed tomography (CT), or magnetic resonance imaging (MRI) imaging technologies; X-ray imaging, for example, mammography; ultrasound imaging; nuclear imaging, for example positron emission tomography (PET), PET/CT scans, bone scans, gallium scans, or metaiodobenzylguanidine (MIBG) scans; bioluminescence imaging (BLI); fluorescence imaging (FLI); BD ToF (infrared-based 3D Time-of-Flight camera) imaging.

[1732] Biomarkers

[1733] The term “marker” or “biomarker” is used herein to refer to a gene or protein whose expression in a subject or sample derived from a subject is altered or modulated, for example, up or down regulated, in cancer. Where the biomarker is a protein, modulation or alteration of expression encompasses modulation through different post-translational modifications.

[1734] In accordance with any aspect of this facet of the present disclosure the biomarkers described herein may be defined as follows, wherein:
[1735] an Axl biomarker comprises an amino acid sequence having at least 70%, 80%, 90%, 95%, 99% or 100% sequence identity with the full-length of the amino acid sequence disclosed at UniProt accession no: P30530-1 or P30530-2 (entry version 196) or a fragment thereof;
[1736] an Interleukin-6 receptor (IL-6r) biomarker comprises an amino acid sequence having at least 70%, 80%, 90%, 95%, 99% or 100% sequence identity with the full-length of the amino acid sequence disclosed at UniProt accession no: P08887-1 or P08887-2 (entry version 210) or a fragment thereof;
[1737] a Chemokine CC-4 (HCC-4) biomarker comprises an amino acid sequence having at least 70%, 80%, 90%, 95%, 99% or 100% sequence identity with the full-length of the amino acid sequence disclosed at UniProt accession no: 015467 (entry version 146) or a fragment thereof;
[1738] a Tissue Inhibitor of Metalloproteinases 1 (TIMP-1) biomarker comprises an amino acid sequence having at least 70%, 80%, 90%, 95%, 99% or 100% sequence identity with the full-length of the amino acid sequence disclosed at UniProt accession no: P01033 (entry version 202) or a fragment thereof;
[1739] a Heparin-Binding EGF-Like Growth Factor (HB-EGF) biomarker comprises an amino acid sequence having at least 70%, 80%, 90%, 95%, 99% or 100% sequence identity with the full-length of the amino acid sequence disclosed at UniProt accession no: Q99075 (entry version 171) or a fragment thereof;
[1740] an Antileukoproteinase (ALP) biomarker comprises an amino acid sequence having at least 70%, 80%, 90%, 95%, 99% or 100% sequence identity with the full-length of the amino acid sequence disclosed at UniProt accession no: P03973 (entry version 184) or a fragment thereof;
[1741] a Latency-Associated Peptide of Transforming Growth Factor beta 1 (LAP TGF-b1) biomarker comprises an amino acid sequence having at least 70%, 80%, 90%, 95%, 99% or 100% sequence identity with the full-length of the amino acid sequence disclosed at UniProt accession no: P01137 (entry version 235) or a fragment thereof;
[1742] an Epidermal Growth Factor (EGF) biomarker comprises an amino acid sequence having at least 70%, 80%, 90%, 95%, 99% or 100% sequence identity with the full-length of the amino acid sequence disclosed at UniProt accession no: P01133-1, P01133-2, or P01133-3 (entry version 204) or a fragment thereof;
[1743] a Platelet-Derived Growth Factor BB (PDGF-BB) biomarker comprises an amino acid sequence having at least 70%, 80%, 90%, 95%, 99% or 100% sequence identity with the full-length of the amino acid sequence disclosed at UniProt accession no: P01127-1 or P01127-2 (entry version 217) or a fragment thereof;
[1744] a Osteoprotegerin (OPG) biomarker comprises an amino acid sequence having at least 70%, 80%, 90%, 95%, 99% or 100% sequence identity with the full-length of the amino acid sequence disclosed at UniProt accession no: 000300 (entry version 155) or a fragment thereof;
[1745] a Neutrophil Activating Peptide 2 (NAP-2) biomarker comprises an amino acid sequence having at least 70%, 80%, 90%, 95%, 99% or 100% sequence identity with the full-length of the amino acid sequence disclosed at UniProt accession no: P02775 (entry version 191) or a fragment thereof;
[1746] an ST2 biomarker comprises an amino acid sequence having at least 70%, 80%, 90%, 95%, 99% or 100% sequence identity with the full-length of the amino acid sequence disclosed at UniProt accession no: Q01638-1, Q01638-2, Q01638-3, or Q01638-4 (entry version 179) or a fragment thereof;
[1747] a Tumor Necrosis Factor Receptor I (TNF RI) biomarker comprises an amino acid sequence having at least 70%, 80%, 90%, 95%, 99% or 100% sequence identity with the full-length of the amino acid sequence disclosed at UniProt accession no: P19438-1, P19438-2, P19438-3, P19438-4, or P19438-5 (entry version 225) or a fragment thereof;
[1748] a Vascular Endothelial Growth Factor (VEGF) biomarker comprises an amino acid sequence having at least 70%, 80%, 90%, 95%, 99% or 100% sequence identity with the full-length of the amino acid sequence disclosed at UniProt accession no: P15692-1, P15692-2, P15692-3, P15692-4, P15692-5, P15692-6, P15692-7, P15692-8, P15692-9, P15692-10, P15692-11, P15692-12, P15692-13, P15692-14, P15692-15, P15692-16, P15692-17, or P15692-18 (entry version 230) or a fragment thereof;
[1749] a Growth-Regulated alpha protein (GRO-alpha) biomarker comprises an amino acid sequence having at least 70%, 80%, 90%, 95%, 99% or 100% sequence identity with the full-length of the amino acid sequence disclosed at UniProt accession no: P09341 (entry version 183) or a fragment thereof;
[1750] a Lactate Dehydrogenase (LDH) biomarker comprises an amino acid sequence having at least 70%, 80%, 90%, 95%, 99% or 100% sequence identity with the full-length of the amino acid sequence disclosed at UniProt accession no: P00338-1, P00338-2, P00338-3, P00338-4, or P00338-5 (entry version 224) or a fragment thereof; and/or
[1751] a Lactate Dehydrogenase (LDH) biomarker comprises an amino acid sequence having at least 70%, 80%, 90%, 95%, 99% or 100% sequence identity with the full-length of the amino acid sequence disclosed at UniProt accession no: P07195-1 (entry version 218) or a fragment thereof.

[1752] The biomarkers described herein may also be defined as a nucleic acid (either DNA or RNA) having at least 70%, 80%, 90%, 95%, 99% or 100% sequence identity with the full-length nucleic acid sequence encoding any of the above amino acid sequences.

[1753] Identity may be as defined using sequence comparisons made using FASTA and FASTP (see Pearson & Lipman, 1988. Methods in Enzymology 183: 63-98). Parameters are preferably set, using the default matrix, as follows: Gapopen (penalty for the first residue in a gap): −12 for proteins/-16 for DNA; Gapext (penalty for additional residues in a gap): −2 for proteins/-4 for DNA; KTUP word length: 2 for proteins/6 for DNA.

[1754] Pre-Treatment Predictive Biomarkers and Methods

[1755] By analysing patient data obtained from clinical trial BGBIL006 (NCT02872259), the authors have discovered that, prior to treatment of subjects having melanoma, certain of the biomarkers described herein are present in the serum of “responder” subjects at higher levels than in the serum of “non-responder” subjects—see Example 2 and Example 7. Similarly, prior to treatment of the subject certain of the biomarkers described herein are present in the serum of “responder” subjects at lower levels than in the serum of “non-responder” subjects. Thus, by assessing the activity, expression, or amount of one or more of the biomarkers described herein prior to treatment with an agent capable of inhibiting or reversing EMT or a chemotherapeutic agent it is possible to determine the likelihood of that subject being susceptible or responsive to treatment with said agent.

[1756] Accordingly, in a first aspect of this facet, the disclosure provides a method of predicting a cancer-related outcome in a subject having, suspected of having, or diagnosed with melanoma, the method comprising assessing the activity, expression, or amount of one or more of the biomarkers described herein in the subject, or in a sample derived from the subject.

[1757] In some embodiments the one or more biomarker is selected from the group consisting of: Axl, Interleukin-6 receptor (IL-6r), Chemokine CC-4 (HCC-4), Tissue Inhibitor of Metalloproteinases 1 (TIMP-1), Heparin-Binding EGF-Like Growth Factor (HB-EGF), Antileukoproteinase (ALP), Latency-Associated Peptide of Transforming Growth Factor beta 1 (LAP TGF-b1), Epidermal Growth Factor (EGF), Platelet-Derived Growth Factor BB (PDGF-BB), Osteoprotegerin (OPG), Neutrophil Activating Peptide 2 (NAP-2), ST2, Tumor Necrosis Factor Receptor I (TNF RI), Vascular Endothelial Growth Factor (VEGF), Growth-Regulated alpha protein (GRO-alpha), and/or Lactate Dehydrogenase (LDH).

[1758] In some embodiments the one or more biomarker is selected from the group consisting of: Axl, Interleukin-6 receptor (IL-6r), Chemokine CC-4 (HCC-4), Tissue Inhibitor of Metalloproteinases 1 (TIMP-1), Heparin-Binding EGF-Like Growth Factor (HB-EGF), Antileukoproteinase (ALP), Latency-Associated Peptide of Transforming Growth Factor beta 1 (LAP TGF-b1), Epidermal Growth Factor (EGF), Platelet-Derived Growth Factor BB (PDGF-BB), Osteoprotegerin (OPG), Neutrophil Activating Peptide 2 (NAP-2), ST2, Tumor Necrosis Factor Receptor I (TNF RI), Vascular Endothelial Growth Factor (VEGF), and/or Growth-Regulated alpha protein (GRO-alpha).

[1759] A “cancer-related outcome” as described herein is a clinical prediction or prognosis associated with cancer. In some embodiments the cancer-related outcome is susceptibility to treatment with an agent capable of inhibiting or reversing EMT or a chemotherapeutic agent.

[1760] In some embodiments the method comprises assessing the activity, expression, or amount of one or more of the biomarkers described herein in the subject, or in a sample derived from the subject, to obtain a sample profile of the one or more biomarker; and, making a prediction based on the sample profile of the one or more biomarker.

[1761] A “sample profile” as used herein is a profile of numerical values or numerical ranges corresponding to the activity, expression, or amount of respective biomarkers determined in the subject or sample derived from the subject.

[1762] In some embodiments of the method the prediction is made by comparing the sample profile to a control profile. A “control profile” as used herein is a profile of numerical values or numerical ranges corresponding to the activity, expression, or amount of the same biomarkers as for the sample profile, determined in a control subject or population of control subjects. Suitable control profiles are described in more detail below.

[1763] Prior to treatment of a subject, certain of the biomarkers described herein have been found to exhibit up-regulated expression in “responder” subjects—that is, certain of the biomarkers described herein have been found to be present in the serum of “responder” subjects at higher levels than in the serum of “non-responder” subjects. Similarly, prior to treatment of a subject, certain of the biomarkers described herein have been found to exhibit down-regulated expression in “responder” subjects—that is, certain of the biomarkers described herein have been found to be present in the serum of “responder” subjects at lower levels than in the serum of “non-responder” subjects.

[1764] This difference in expression level between “responder” and “non-responder” subjects can also be expressed in the opposite way. That is to say, prior to treatment of a subject, certain of the biomarkers described herein have been found to exhibit down-regulated expression in “non-responder” subjects—that is, certain of the biomarkers described herein have been found to be present in the serum of “non-responder” subjects at lower levels than in the serum of “responder” subjects. Similarly, prior to treatment of a subject, certain of the biomarkers described herein have been found to exhibit up-regulated expression in “non-responder” subjects—that is, certain of the biomarkers described herein have been found to be present in the serum of “non-responder” subjects at higher levels than in the serum of “responder” subjects.

[1765] The discovery of these differential patterns of expression mean that, by assessing the activity, expression, or amount of one or more of the biomarkers described herein prior to treatment of a subject with an agent, it is possible to determine the likelihood of that subject being susceptible or responsive to treatment with said agent. Accordingly, in particularly preferred embodiments the sample profile is obtained before the subject is contacted with or administered the agent capable of inhibiting or reversing EMT or a chemotherapeutic agent.

[1766] A subject who is “susceptible to treatment” with an agent capable of inhibiting or reversing EMT or a chemotherapeutic agent is one who is likely to, or who does, respond to treatment (or benefit from treatment) with an agent capable of inhibiting or reversing EMT or a chemotherapeutic agent. That is, a subject who is “susceptible to treatment” with an agent is a “responder” subject for that agent, as defined above. A prediction that is “indicative of susceptibility” is one which suggests or points towards the likelihood that a subject will respond to or benefit from treatment.

[1767] In some embodiments the predictive methods of the disclosure comprise assessing the activity, expression, or amount of one or more of the biomarkers described herein in the subject, or in a sample derived from the subject, to obtain a sample profile of the one or more biomarker; and, making a prediction based on the sample profile of the one or more biomarker. In some embodiments of the method the prediction is made by comparing the sample profile to a control profile, wherein the control profile is a profile of numerical values or numerical ranges corresponding to the activity, expression, or amount of the same biomarkers as for the sample profile, determined in a control subject or population of control subjects.

[1768] In some embodiments the control profile may be obtained from a population of control subjects having melanoma. In some embodiments the control profile may be obtained from a population of control subjects not having melanoma. In other embodiments the control profile may be obtained from a control subject or population of control subjects having melanoma and previously found to lack susceptibility to treatment with an agent capable of inhibiting or reversing EMT or a chemotherapeutic agent (that is, non-responder subjects).

[1769] In some embodiments the control profile may a predetermined profile of biomarker expression, activity, or amount values, for example a profile of “mean” values, “threshold” values, or “standard ranges” of values. This predetermined profile of biomarker expression, activity, or amount values can be obtained, for example, from a control subject or population of control subjects having melanoma, a control subject or population of control subjects not having melanoma, or a control subject or population of control subjects having melanoma and previously found to lack susceptibility to treatment with an agent capable of inhibiting or reversing EMT or a chemotherapeutic agent (that is, non-responder subjects).

[1770] In some other embodiments the control profile may be obtained from a control subject or population of control subjects having melanoma and previously found to be susceptible to treatment with an agent capable of inhibiting or reversing EMT or a chemotherapeutic agent (that is, responder subjects). In some embodiments the control profile may a predetermined profile of biomarker expression, activity, or amount values, for example a profile of “threshold”, values or “standard ranges” of values. This predetermined profile of biomarker expression, activity, or amount values can be obtained, for example, from a control subject or population of control subjects having melanoma and previously found to be susceptible to treatment with an agent capable of inhibiting or reversing EMT or a chemotherapeutic agent (that is, responder subjects).

[1771] In some other embodiments the control profile may be obtained from a control sample having a known amount (for example a “threshold” amount) of the same biomarkers as will be determined in the sample profile. This threshold amount can be obtained, for example, from non-responder or responder subjects as outlined above.

[1772] The skilled person is readily able to determine suitable “mean”, “threshold”, or “standard range” values for a particular biomarker.

[1773] For example, a “mean” value may be determined by: assessing the activity, expression, or amount of a particular biomarker in a population of subjects having (or not having) melanoma; and, averaging the biomarker activity, expression, or amount determined to determine a “mean” value.

[1774] For example, a “mean” value may be determined by: assessing the activity, expression, or amount of a particular biomarker in a population of subjects; determining which subjects in the population are susceptible to treatment with an agent capable of inhibiting or reversing EMT or a chemotherapeutic agent; and, averaging the biomarker activity, expression, or amount determined in subjects found to be susceptible to treatment with an agent capable of inhibiting or reversing EMT or a chemotherapeutic agent (that is, responder subjects) to determine a “mean” value.

[1775] For example, a “threshold” value may be determined by: assessing the activity, expression, or amount of a particular biomarker in a population of subjects; determining which subjects in the population are susceptible to treatment with an agent capable of inhibiting or reversing EMT or a chemotherapeutic agent; and, selecting as appropriate the highest or lowest biomarker activity, expression, or amount determined in a subject found to be susceptible to treatment with an agent capable of inhibiting or reversing EMT or a chemotherapeutic agent (that is, a responder subject) as the “threshold value”.

[1776] For example, a “standard range” of values may be determined by: assessing the activity, expression, or amount of a particular biomarker in a population of subjects having (or not having) melanoma; and, determining a “standard range” of values based on this assessment.

[1777] For example, a “standard range” of values may be determined by: assessing the activity, expression, or amount of a particular biomarker in a population of subjects; determining which subjects in the population are susceptible to treatment with an agent capable of inhibiting or reversing EMT or a chemotherapeutic agent; and, determining a “standard range” of values for subjects found to be susceptible to treatment with an agent capable of inhibiting or reversing EMT or a chemotherapeutic agent (that is, a responder subject) based on this assessment.

[1778] Where the control profile is a predetermined profile of biomarker expression, activity, or amount values, this may be provided as a “look-up table” or data record. Predetermined control profiles of this type may be a profile of numerical values or numerical ranges corresponding to a measure of central tendency (such as an average, median or mean) amount of the respective biomarkers determined in a plurality of control subjects (for example non-responder or responder subjects as outlined above). The skilled person is readily able to determine both a measure of central tendency and a measure of variability within a population using standard protein quantification techniques and suitable statistical tools.

[1779] Accordingly, in embodiments in which the control profile is: obtained from a population of control subjects having melanoma; obtained from a population of control subjects not having melanoma; obtained from a control subject or population of control subjects having melanoma and previously found to lack susceptibility to treatment with an agent capable of inhibiting or reversing EMT or a chemotherapeutic agent (that is non-responder subjects); a predetermined profile of biomarker expression, activity, or amount values (for example a profile of “average, median, or mean” values or “standard ranges” of values) obtained from non-responder subjects; obtained from a control sample having a known “average, median, or mean” value of biomarkers indicative of non-responder subjects; a predetermined profile of biomarker expression, activity, or amount “threshold” values obtained from responder subjects; or, obtained from a control sample having a known “threshold” value of biomarkers indicative of responder subjects; then, a higher activity, expression, or amount of one or more of the biomarkers described herein in a sample profile as compared with the control profile may be indicative of susceptibility to treatment with an agent capable of inhibiting or reversing EMT or a chemotherapeutic agent. Similarly, a lower activity, expression, or amount of one or more of the biomarkers described herein in the sample profile as compared with a control profile may be indicative of susceptibility to treatment with an agent capable of inhibiting or reversing EMT or a chemotherapeutic agent.

[1780] In some such embodiments, the method may comprise assessing the activity, expression, or amount of one or more of biomarker selected from: TIMP-1, HB-EGF, ALP, LAP TGF-b1, EGF, PDGF-BB, OPG, NAP-2, ST2, TNF RI, VEGF, GRO-alpha, and/or LDH; wherein a higher activity, expression, or amount of one or more of said biomarkers in the sample profile as compared with the control profile is indicative of susceptibility to treatment with an agent capable of inhibiting or reversing EMT or a chemotherapeutic agent.

[1781] In some such embodiments, the method may comprise assessing the activity, expression, or amount of one or more of biomarker selected from: Axl, IL-6r, and/or HCC-4; wherein a lower activity, expression, or amount of one or more of said biomarkers in the sample profile as compared with the control profile is indicative of susceptibility to treatment with an agent capable of inhibiting or reversing EMT or a chemotherapeutic agent.

[1782] In some such embodiments: a lower activity, expression, or amount of Axl; and/or a lower activity, expression, or amount of IL-6r; and/or a lower activity, expression, or amount of HCC-4; and/or a higher activity, expression, or amount of TIMP-1; and/or a higher activity, expression, or amount of HB-EGF; and/or a higher activity, expression, or amount of ALP; and/or a higher activity, expression, or amount of LAP TGF-b1; and/or a higher activity, expression, or amount of EGF; and/or a higher activity, expression, or amount of PDGF-BB; and/or a higher activity, expression, or amount of OPG; and/or a higher activity, expression, or amount of NAP-2; and/or a higher activity, expression, or amount of ST2; and/or a higher activity, expression, or amount of TNF RI; and/or a higher activity, expression, or amount of VEGF; and/or a higher activity, expression, or amount of GRO-alpha; and/or a higher activity, expression, or amount of LDH in the sample profile as compared with the control profile is indicative of susceptibility to treatment with an agent capable of inhibiting or reversing EMT or a chemotherapeutic agent.

[1783] In embodiments in which the control profile is: obtained from a control subject or population of control subjects having melanoma and previously found to be susceptible to treatment with an agent capable of inhibiting or reversing EMT or a chemotherapeutic agent (that is, responder subjects); then, if the expression, activity, or amount values in the sample profile are above a “threshold” value typical of a responder subject (that is, a subject having melanoma and previously found to be susceptible to treatment with an agent capable of inhibiting or reversing EMT or a chemotherapeutic agent) this is indicative of susceptibility to treatment with an agent capable of inhibiting or reversing EMT or a chemotherapeutic agent. Similarly, if the expression, activity, or amount values in the sample profile are below the “threshold” value typical of a responder subject (that is, a subject having melanoma and previously found to be susceptible to treatment with an agent capable of inhibiting or reversing EMT or a chemotherapeutic agent) this is indicative of a lack of susceptibility to treatment with an agent capable of inhibiting or reversing EMT or a chemotherapeutic agent.

[1784] In embodiments in which the control profile is: a predetermined profile of “standard ranges” of biomarker expression, activity, or amount values obtained from responder subjects; then, if the expression, activity, or amount values in the sample profile are within the “standard range” of values typical of a responder subject (that is, a subject having melanoma and previously found to be susceptible to treatment with an agent capable of inhibiting or reversing EMT or a chemotherapeutic agent) this is indicative of susceptibility to treatment with an agent capable of inhibiting or reversing EMT or a chemotherapeutic agent. Similarly, if the expression, activity, or amount values in the sample profile are outside the “standard range” of values typical of a responder subject (that is, a subject having melanoma and previously found to be susceptible to treatment with an agent capable of inhibiting or reversing EMT or a chemotherapeutic agent) this is indicative of a lack of susceptibility to treatment with an agent capable of inhibiting or reversing EMT or a chemotherapeutic agent.

[1785] In embodiments in which the control profile is: a predetermined profile of “standard ranges” of biomarker expression, activity, or amount values obtained from non-responder subjects; then, if the expression, activity, or amount values in the sample profile are within the “standard range” of values typical of a non-responder subject (that is, a subject having melanoma and previously found to lack susceptibility to treatment with an agent capable of inhibiting or reversing EMT or a chemotherapeutic agent) this is indicative of a lack of susceptibility to treatment with an agent capable of inhibiting or reversing EMT or a chemotherapeutic agent. Similarly, if the expression, activity, or amount values in the sample profile are outside the “standard range” of values typical of a non-responder subject (that is, a subject having melanoma and previously found to lack susceptibility to treatment with an agent capable of inhibiting or reversing EMT or a chemotherapeutic agent) this may be indicative of susceptibility to treatment with an agent capable of inhibiting or reversing EMT or a chemotherapeutic agent.

[1786] In embodiments in which the control profile is: obtained from a population of control subjects not having melanoma; then, if the expression, activity, or amount values in the sample profile are outside a “standard range” of values typical of subjects not having melanoma, this is indicative of susceptibility to treatment with an agent capable of inhibiting or reversing EMT or a chemotherapeutic agent. Similarly, if the expression, activity, or amount values in the sample profile are within a “standard range” of values typical of subjects not having melanoma, this is indicative of a lack of susceptibility to treatment with an agent capable of inhibiting or reversing EMT or a chemotherapeutic agent. In such cases, an expression, activity or amount value may be outside the “standard range” of values when it is either above the upper limit of normal or below the lower limit of normal for a given biomarker. The upper limit of normal and lower limit of normal are the limits of the normal distribution of a given biomarker in a population of control subjects not having melanoma.

[1787] In embodiments in which the one or more biomarker comprises LDH, an expression or amount of LDH higher than 287 units per litre (U/L) may be indicative of susceptibility to treatment with an agent capable of inhibiting or reversing EMT or a chemotherapeutic agent.

[1788] The skilled person is readily able to determine whether the sample profile is indicative of susceptibility or lack of susceptibility to treatment with an agent capable of inhibiting or reversing EMT or a chemotherapeutic agent using suitable statistical tools and comparison with the appropriate control.

[1789] In some embodiments the sample profile may be compared with two or more control profiles as described above.

[1790] As used herein, the term “one or more” means 1, 2, 3, 4, 5, 6, 7, 8, 9, 10, 11, 12, 13, 14, 15, 16, 17, 18, 19, or 20 of the biomarkers described herein. In some embodiments the one or more biomarker is Axl. In some embodiments the one or more biomarker is IL-6r. In some embodiments the one or more biomarker is HCC-4. In some embodiments the one or more biomarker is TIMP-1. In some embodiments the one or more biomarker is HB-EGF. In some embodiments the one or more biomarker is ALP. In some embodiments the one or more biomarker is LAP TGF-b1. In some embodiments the one or more biomarker is EGF. In some embodiments the one or more biomarker is PDGF-BB. In some embodiments the one or more biomarker is OPG. In some embodiments the one or more biomarker is NAP-2. In some embodiments the one or more biomarker is ST2. In some embodiments the one or more biomarker is TNF RI. In some embodiments the one or more biomarker is VEGF. In some embodiments the one or more biomarker is GRO-alpha. In some embodiments the one or more biomarker is LDH. In some preferred embodiments the one or more biomarker is Axl. In some preferred embodiments the one or more biomarker is LDH. In other preferred embodiments the one or more biomarker is Axl and LDH.

[1791] In some embodiments the method may comprise assessing the activity, expression, or amount of at least 2, 3, 4, 5, 6, 7, 8, 9, 10, 11, 12, 13, 14, 15, 20 of said biomarkers in the subject, or in a sample derived from the subject. In some embodiments the method may comprise assessing the activity, expression, or amount of Axl and at least 1, 2, 3, 4, 5, 6, 7, 8, 9, 10, 11, 12, 13, 14, 15, 20 further biomarkers described herein in the subject, or in a sample derived from the subject. In some embodiments the method may comprise assessing the activity, expression, or amount of LDH and at least 1, 2, 3, 4, 5, 6, 7, 8, 9, 10, 11, 12, 13, 14, 15, 20 further biomarkers described herein in the subject, or in a sample derived from the subject. In some embodiments the method may comprise assessing the activity, expression, or amount of Axl, LDH, and at least 1, 2, 3, 4, 5, 6, 7, 8, 9, 10, 11, 12, 13, 14, 15, 20 further biomarkers described herein in the subject, or in a sample derived from the subject.

[1792] Subject

[1793] A “subject” as referred to herein is any species of animal classified as a mammal, and includes but is not restricted to, domestic and farm animals, primates and humans. In some preferred embodiments the subject is a human of any sex or race. In some embodiments, the human is an adult human.

[1794] In some embodiments the predictive methods described herein are performed before the subject receives a treatment or course of treatment for melanoma. In other embodiments the predictive method is performed during or after a treatment or course of treatment for melanoma. In some embodiments the treatment or course of treatment for melanoma is an agent capable of inhibiting or reversing EMT. In other embodiments the treatment or course of treatment for melanoma is a chemotherapeutic treatment that is not an agent capable of inhibiting or reversing EMT.

[1795] In some embodiments of the predictive methods described herein the subject has previously been treated with an agent capable of inhibiting or reversing EMT or a chemotherapeutic agent. In some embodiments the subject has previously been treated with an agent selected from: a PHGDH inhibitor, a Slfn11 inhibitor, an Axl inhibitor, or an Akt3 inhibitor.

[1796] In some embodiments of the predictive methods described herein the subject has previously been treated with an agent that is different to the agent capable of inhibiting or reversing EMT or chemotherapeutic agent for which the subject's response is being predicted. That is, the subject has previously been treated with an agent that is not the agent which the predictive method is determining the subject's susceptibility to. Accordingly, in some embodiments, the subject has not previously been treated with an agent capable of inhibiting or reversing EMT or a chemotherapeutic agent. In some preferred embodiments, the subject has not previously been treated with an Axl inhibitor. In other preferred embodiments, the subject has not previously been treated with an Akt3 inhibitor.

[1797] Post-Treatment Changes in Biomarkers

[1798] In some embodiments of this aspect of the disclosure, the predictive method further comprises a subsequent step of assessing the activity, expression, or amount of one or more biomarker in the subject, or in a sample derived from the subject, to obtain a second sample profile of one or more of the biomarkers described herein after the subject has received a treatment or course of treatment an agent capable of inhibiting or reversing EMT or a chemotherapeutic agent.

[1799] That is, in some embodiments, the predictive method comprises:
[1800] (a) determining if a subject is susceptible to treatment with an agent capable of inhibiting or reversing EMT or a chemotherapeutic agent by assessing the activity, expression, or amount of one or more biomarker in the subject, as outlined above;
[1801] (b) administering to the subject a therapeutically effective amount of an agent capable of inhibiting or reversing EMT or a chemotherapeutic agent; and
[1802] (c) subsequently assessing the activity, expression, or amount of one or more biomarker in the subject, or in a sample derived from the subject.

[1803] In some embodiments, the predictive method comprises:
[1804] (a) determining if a subject is susceptible to treatment with an agent capable of inhibiting or reversing EMT or a chemotherapeutic agent by assessing the activity, expression, or amount of one or more biomarker in the subject, or in a sample derived from the subject, wherein the one or more biomarker is selected from the group consisting of: Axl, IL-6r, HCC-4, TIMP-1, HB-EGF, ALP, LAP TGF-b1, EGF, PDGF-BB, OPG, NAP-2, ST2, TNF RI, VEGF, GRO-alpha, and/or LDH;
[1805] (b) administering to the subject a therapeutically effective amount of an agent capable of inhibiting or reversing EMT or a chemotherapeutic agent; and
[1806] (c) subsequently assessing the activity, expression, or amount of one or more biomarker in the subject, or in a sample derived from the subject.

[1807] In some embodiments, the predictive method comprises:
[1808] (a) determining if a subject is susceptible to treatment with an agent capable of inhibiting or reversing EMT or a chemotherapeutic agent by assessing the activity, expression, or amount of one or more biomarker in the subject, or in a sample derived from the subject, wherein the one or more biomarker is selected from the group consisting of: Axl, IL-6r, HCC-4, TIMP-1, HB-EGF, ALP, LAP TGF-b1, EGF, PDGF-BB, OPG, NAP-2, ST2, TNF RI, VEGF, and/or GRO-alpha;
[1809] (b) administering to the subject a therapeutically effective amount of an agent capable of inhibiting or reversing EMT or a chemotherapeutic agent; and
[1810] (c) subsequently assessing the activity, expression, or amount of one or more biomarker in the subject, or in a sample derived from the subject.

[1811] In some preferred embodiments the methods comprise subsequently assessing the activity, expression, or amount of Axl in the subject, or in a sample derived from the subject. In some embodiments an increase in the activity, expression, or amount of Axl in the second sample profile as compared with a control profile after contacting the subject with a cancer therapeutic agent is indicative of higher susceptibility to treatment with an agent capable of inhibiting or reversing EMT or a chemotherapeutic agent. In some preferred embodiments the control profile is obtained from the same subject prior to treatment with an agent capable of inhibiting or reversing EMT or a chemotherapeutic agent.

[1812] Post-Treatment Predictive Biomarkers and Methods

[1813] By analysing patient data obtained from clinical trial BGBIL006 (NCT02872259), the authors have discovered that, following treatment of subjects having melanoma with an agent capable of inhibiting or reversing EMT or a chemotherapeutic agent, the levels of certain of the biomarkers described herein increases in the serum of “responder” subjects but not in the serum of “non-responder” subjects. Similarly, following treatment with an agent capable of inhibiting or reversing EMT or a chemotherapeutic agent, the levels of certain of the biomarkers described herein decreases in the serum of “responder” subjects but not in the serum of “non-responder” subjects. Thus, by assessing the activity, expression, or amount of one or more of the biomarkers described herein prior to and following treatment with an agent capable of inhibiting or reversing EMT or a chemotherapeutic agent it is possible to determine or confirm that the subject is susceptible or responsive to treatment with said agent.

[1814] Accordingly, in an second aspect of this facet the disclosure provides a method of predicting a cancer-related outcome in a subject having, suspected of having, or diagnosed with melanoma, the method comprising assessing the activity, expression, or amount of one or more of the biomarkers described herein in a subject, or in a sample derived from the subject after the subject has been contacted with an agent capable of inhibiting or reversing EMT or a chemotherapeutic agent. In some embodiments the cancer-related outcome is susceptibility to treatment with an agent capable of inhibiting or reversing EMT or a chemotherapeutic agent.

[1815] In some embodiments the method comprises assessing the activity, expression, or amount of one or more of the biomarkers described herein in the subject, or in a sample derived from the subject, to obtain a sample profile of the one or more biomarker; and, making a prediction based on the sample profile of the one or more biomarker. In some embodiments of the method the prediction is made by comparing the sample profile to a control profile. In preferred embodiments the sample profile is obtained after contacting the subject with an agent capable of inhibiting or reversing EMT or a chemotherapeutic agent.

[1816] A “control profile” as used herein is a profile of numerical values or numerical ranges corresponding to the activity, expression, or amount of the same biomarkers as for the sample profile, determined in a control subject or population of control subjects.

[1817] In preferred embodiments of this aspect of the disclosure the control profile is obtained from the same subject prior to treatment with an agent capable of inhibiting or reversing EMT or a chemotherapeutic agent. In some embodiments the control profile is obtained from a population of control subjects having melanoma. In other embodiments, the control profile is a predetermined profile of biomarker expression, activity, or amount values, for example a profile of “threshold” values or “standard ranges” of values. Accordingly, in embodiments in which the control profile is obtained from the same subject prior to treatment with an agent capable of inhibiting or reversing EMT or a chemotherapeutic agent, an increase in the activity, expression, or amount of one or more biomarker in the sample profile as compared with a control profile after contacting the subject with an agent capable of inhibiting or reversing EMT or a cancer therapeutic agent may be indicative of susceptibility to treatment with an agent capable of inhibiting or reversing EMT or a chemotherapeutic agent. In such embodiments, a decrease in the activity, expression, or amount of one or more biomarker in the sample profile as compared with a control profile after contacting the subject with a cancer therapeutic agent may be indicative of higher susceptibility to treatment with an agent capable of inhibiting or reversing EMT or a chemotherapeutic agent.

[1818] In some such embodiments, an increase in the activity, expression, or amount of one or more biomarker in the sample profile as compared with a control profile after contacting the subject with a cancer therapeutic agent may be indicative of lower susceptibility to treatment with an agent capable of inhibiting or reversing EMT or a chemotherapeutic agent. In some such embodiments, a decrease in the activity, expression, or amount of one or more biomarker in the sample profile as compared with a control profile after contacting the subject with a cancer therapeutic agent may be indicative of lower susceptibility to treatment with an agent capable of inhibiting or reversing EMT or a chemotherapeutic agent.

[1819] In some preferred embodiments the one or more biomarker includes at least Axl. In some embodiments the one or more biomarker is Axl. In some embodiments an increase in the activity, expression, or amount of Axl in the sample profile as compared with a control profile after contacting the subject with a cancer therapeutic agent is indicative of higher susceptibility to treatment with an agent capable of inhibiting or reversing EMT or a chemotherapeutic agent.

[1820] Subject

[1821] A “subject” as referred to herein is any species of animal classified as a mammal, and includes but is not restricted to, domestic and farm animals, primates and humans. In some preferred embodiments the subject is a human of any sex or race. In some embodiments, the human is an adult human.

[1822] In some embodiments of this aspect of the disclosure, the subject was selected for treatment with the agent capable of inhibiting or reversing EMT or a chemotherapeutic agent, using a predictive method according to the first aspect of this facet of the disclosure outlined above.

[1823] Agents Capable of Inhibiting or Reversing EMT

[1824] The present disclosure provides methods for predicting a cancer-related outcome in a subject having, suspected of having, or diagnosed with melanoma. A “cancer-related outcome” is a clinical prediction or prognosis associated with cancer.

[1825] The agents capable of inhibiting or reversing EMT for use in this melenoma facet of the disclosure are defined as described above in the AML facet (see identically titled section above on page 14, line 19 to page 17, line 2), except with preferred embodiments as set out below.

[1826] In some preferred embodiments the further cancer treatment is a PD-1 inhibitor or PD-L1 inhibitor. In some preferred embodiments the further cancer treatment is a monoclonal antibody such as pembrolizumab, alemtuzumab, bevacizumab, cetuximab, ibritumomab tiuxetan, or rituximab, or is a B-Raf inhibitor such as debrafenib, a MEK inhibitor such as trametinib or a combination therapy of these agents. In some particularly preferred embodiments the further cancer treatment is pembrolizumab. In other particularly preferred embodiments the further cancer treatment is a combination therapy of debrafenib and trametinib.

[1827] Assessing Biomarker Activity, Expression, Amount

[1828] In some embodiments of the predictive methods described herein, assessing the activity, expression, or amount of one or more biomarker in a subject, or in a sample derived from a subject, comprises: contacting a sample, or an extract from a sample, with at least 1, 2, 3, 4, 5, 6, 7, 8, 9, 10 or more reagents for detecting the activity, expression, or amount of one or more biomarkers, each of which is selective for a particular biomarker; and, detecting and/or quantifying said reagents for detecting.

[1829] In some embodiments comprising assessing the activity of LDH, assessing the activity of LDH comprises determining the enzymatic activity of LDH in the subject or sample derived from the subject. Preferably the enzymatic activity is assessed by determining the level or amount of a substrate or product of the enzymatic reaction catalysed by LDH in the subject or sample derived from the subject. In particularly preferred embodiments the enzymatic activity is assessed by determining the level or amount of reduced nicotinamide adenine dinucleotide (NADH) in the subject or sample derived from the subject. In some embodiments this may be determined using a colorimetric assay, for example, the colorimetric assay available from Sigma-Aldrich with catalogue number MAK066. Other suitable assays for assessing activity of LDH are well known to the skilled person. In particularly preferred embodiments the activity of LDH is assessed by determining the enzymatic activity of LDH in blood or serum.

[1830] In some preferred embodiments, assessing the expression or amount of the one or more biomarker comprises determining the level of the one or more biomarker protein or mRNA in the subject or sample derived from the subject. Preferably the expression or amount of the one or more biomarker is assessed by determining the level of protein expression. In particularly preferred embodiments the expression or amount of the one or more biomarker is assessed by determining the level of protein expression in serum.

[1831] The term “expression” refers to the transcription of a gene's DNA template to produce the corresponding mRNA and translation of this mRNA to produce the corresponding gene product (i.e., a peptide, polypeptide, or protein) as well as the “expression” of a protein in one or more forms that may have been modified post translation.

[1832] In some embodiments determining the level of the one or more biomarker protein or mRNA comprises: contacting a sample, or an extract from a sample, with at least 1, 2, 3, 4, 5, 6, 7, 8, 9, 10 or more specific binding members, each of which selectively binds to a respective biomarker protein or mRNA; and, detecting and/or quantifying formation of complex formed by said specific binding member and said biomarker protein or mRNA. In some embodiments the specific binding member may comprise an antibody molecule or a binding fragment thereof.

[1833] A range of suitable techniques for determining protein and mRNA expression levels are well known in the art, for example microarray analysis, Western blotting, and PCR techniques such as QPCR. In some embodiments, determining the expression or amount of the one or more biomarker protein or mRNA may comprise use of a technique selected from: Western blot; enzyme-linked immunosorbent assay (ELISA); radioimmunoassay (RIA); competitive enzyme immunoassay; double antibody sandwich ELISA (DAS-ELISA); liquid immunoarray technology; immunocytochemistry; immunohistochemistry; antibody microarray detection; precipitation of colloidal gold; affinity chromatography; ligand binding assay; and lectin binding assay.

[1834] In some embodiments, the expression or amount of the one or more biomarker is determined as an absolute amount of the respective biomarker protein or mRNA in the sample. In such cases, the respective biomarker protein or mRNA may be quantified in the sample and the amount expressed as a measure of the sample, for example the volume, mass, or total protein content of the sample.

[1835] In some embodiments, the expression or amount of the one or more biomarker is determined as a relative amount of the respective biomarker protein or mRNA in the sample, wherein the relative amount is determined relative to a reference protein or mRNA in the sample. Determining the relative amount of biomarker protein or mRNA in this way allows for normalisation to, e.g., account for differences in total protein concentration and to remove bias from sample to sample.

[1836] Preferably the reference protein or mRNA is one whose expression or amount does not vary significantly between subjects having cancer and subjects not having cancer, in particular melanoma. That is, the reference protein or mRNA is preferably one whose expression or amount is not altered by melanoma. Accordingly, the reference protein or mRNA may comprise one or more protein or mRNA which is not one of the biomarkers described herein. When expressing the expression or amount of the one or more biomarker as a relative amount, the absolute amount of the respective biomarker protein or mRNA in the sample may be divided by the absolute amount of the reference protein or mRNA in the sample.

[1837] Assessing Biomarker Expression at the RNA Level

[1838] Gene expression can be detected at the RNA level. RNA may be extracted from cells using RNA extraction techniques including, for example, using acid phenol/guanidine isothiocyanate extraction (RNAzol B; Biogenesis), RNeasy RNA preparation kits (Qiagen) or PAXgene (PreAnalytix, Switzerland). Typical assay formats utilising ribonucleic acid hybridisation include nuclear run-on assays, RT-PCR, RNase protection assays (Melton et al., Nuc. Acids Res. 12:7035), Northern blotting and In Situ hybridization. Gene expression can also be detected by microarray analysis as described below.

[1839] Assessing Biomarker Expression at the Protein Level

[1840] Preferably biomarker level is assessed by measuring protein expression. Altered gene or protein expression may also be detected by measuring the polypeptides encoded by the gene. This may be achieved by using molecules which bind to the polypeptides encoded by the biomarker gene. Suitable molecules/agents which bind either directly or indirectly to the polypeptides in order to detect the presence of the protein include naturally occurring molecules such as peptides and proteins, for example antibodies, or they may be synthetic molecules.

[1841] Antibodies may be derived from commercial sources or through techniques which are familiar to those skilled in the art. In one embodiment, and where altered expression manifests itself through the expression of alteration of post translationally-modified forms of a protein biomarker, antibodies specific for those different forms may be used. For the purposes of this disclosure, the term “antibody”, unless specified to the contrary, includes whole antibodies, or fragments of whole antibodies which retain their binding activity for a target antigen. Such fragments include Fv, F(ab′) and F(ab′)2 fragments, as well as single chain antibodies (scFv). Furthermore, the antibodies and fragments thereof may be humanised antibodies, for example as described in EP239400A. For example: monoclonal and polyclonal antibodies, recombinant antibodies, proteolytic and recombinant fragments of antibodies (Fab, Fv, scFv, diabodies), single-domain antibodies (VHH, sdAb, nanobodies, IgNAR, VNAR), and proteins unrelated to antibodies, which have been engineered to have antibody-like specific binding. Antibodies may be bound to a solid support and/or packaged into kits in a suitable container along with suitable reagents, controls, instructions and the like.

[1842] Arrays

[1843] Array technology and the various techniques and applications associated with it are well known in the art. Array technology overcomes the disadvantages with traditional methods in molecular biology, which generally work on a “one gene in one experiment” basis, resulting in low throughput and the inability to appreciate the “whole picture” of gene function. In the context of the products and methods of the present disclosure, array technology can be used, for example, in the analysis of the expression of biomarker proteins or mRNA.

[1844] In general, any library or group of samples may be arranged in an orderly manner into an array, by spatially separating the members of the library or group. Examples of suitable libraries for arraying include nucleic acid libraries (including DNA, cDNA, oligonucleotide, etc. libraries), peptide, polypeptide and protein libraries, as well as libraries comprising any molecules, such as ligand libraries, among others. Accordingly, where reference is made to a “library” in this document, unless the context dictates otherwise, such reference should be taken to include reference to a library in the form of an array.

[1845] Proteins, polypeptides, etc., may also be immobilised in arrays. For example, antibodies have been used in microarray analysis of the proteome using protein chips (Borrebaeck C A, 2000, Immunol Today 21(8):379-82). Polypeptide arrays are reviewed in, for example, MacBeath and Schreiber, 2000, Science, 289(5485):1760-1763.

[1846] Sample

[1847] Suitable samples include, but are not limited to, tissue samples such as tissue biopsy, blood, urine, buccal scrapes etc., as well as serum, plasma, or tissue culture supernatant samples. In preferred embodiments the expression or amount of the one or more biomarker is assessed by determining the level of protein expression in the sample. In some preferred embodiments the sample is a blood, serum, or plasma sample. In some particularly preferred embodiments the sample is a serum sample.

[1848] When assessing the expression or amount of the one or more biomarker proteins or mRNA in serum or plasma samples derived from a subject, samples are removed and subjected to analytical techniques such as flow cytometry, mass cytometry (CyTOF), ELISA, PET, and SELDI-TOF MS. In some embodiments, the method may comprise extracting RNA from said sample and detecting gene expression by QPCR. In some other embodiments, gene expression may be detected by detecting protein products by, for example, Western Blot.

[1849] In some embodiments, the level of expression of the one or more biomarker is assessed by determining the copy number of the gene encoding the one or more biomarker. Copy number (i.e. gene duplication events) may be determined using standard techniques known in the art, e.g. using a DNA chip as described in Jiang et al. (Jiang Q, Ho Y Y, Hao L, Nichols Berrios C, Chakravarti A. Copy number variants in candidate genes are genetic modifiers of Hirschsprung disease. PLoS One. 2011; 6(6)).

[1850] Is some preferred embodiments of the predictive methods described herein, the method is performed in vitro or ex vivo.

[1851] Methods of Selecting a Subject for Treatment

[1852] A third aspect of this facet of the present disclosure relates to methods of selecting subjects having, suspected of having, or diagnosed with melanoma for treatment with an agent capable of inhibiting or reversing EMT or a chemotherapeutic agent. In some embodiments the method comprises: identifying subjects susceptible to treatment with an agent capable of inhibiting or reversing EMT or a chemotherapeutic agent using a predictive method defined in accordance with the above described first and second aspects of this facet of the disclosure; and, selecting thus identified subjects for treatment.

[1853] In some embodiments this aspect relates to methods of selecting subjects having, suspected of having, or diagnosed with melanoma for continued treatment with an agent capable of inhibiting or reversing EMT or a chemotherapeutic agent. In some embodiments the method comprises: identifying subjects susceptible to treatment with an agent capable of inhibiting or reversing EMT or a chemotherapeutic agent using a predictive method defined in accordance with the above described second aspect of the disclosure; and, selecting thus identified subjects for treatment.

[1854] In some embodiments of this aspect of the disclosure, the treatment comprises administering to the subject a therapeutically effective amount of an agent capable of inhibiting or reversing EMT or a chemotherapeutic agent as described herein. Accordingly, in some embodiments the treatment comprises an Axl inhibitor, Akt3 inhibitor, Slfn11 inhibitor, or PHGDH inhibitor. In some preferred embodiments the treatment comprises an Axl inhibitor, for example, BGB324/R428/bemcentinib, cabozantinib, TP-0903, foretinib, merestinib, bosutinib, gilteritinib, crizotinib, amuvatinib, sunitinib, sitravatinib, LDC1267, or UNC2025. Other Axl inhibitors include the anti-Axl antibodies described in WO2015/193428, WO2015/193430, WO2016/097370, and WO2016/166296. In some preferred embodiments the Axl inhibitor is an anti-Axl antibody described in WO2015/193428, WO2015/193430, WO2016/097370, or WO2016/166296. In some particularly preferred embodiments the Axl inhibitor is BGB324/R428/bemcentinib.

[1855] In some other preferred embodiments, the treatment comprises an Akt3 inhibitor. In some embodiments the Akt3 inhibitor is an Akt3 inhibitor disclosed in WO2016/102672.

[1856] In some embodiments of this aspect of the disclosure, the treatment is administered as a single agent. In other embodiments, the treatment is administered in combination with a further cancer treatment. Suitable further cancer treatments are outlined in detail above. In some preferred embodiments the further cancer treatment is a PD-1 inhibitor or PD-L1 inhibitor. In some embodiments the further cancer treatment is a monoclonal antibody such as pembrolizumab, alemtuzumab, bevacizumab, cetuximab, ibritumomab tiuxetan, or rituximab, or is a B-Raf inhibitor such as debrafenib, a MEK inhibitor such as trametinib or a combination therapy of these agents. In some particularly preferred embodiments the further cancer treatment is pembrolizumab. In other particularly preferred embodiments the further cancer treatment is a combination therapy of debrafenib and trametinib.

[1857] Kits

[1858] A fourth aspect of this facet of the present disclosure relates to diagnostic kits and test devices. In some embodiments the disclosure provides a diagnostic kit comprising 1, 2, 3, 4, 5, 6, 7, 8, 9, 10 or more reagents for detecting the activity, expression, or amount of one or more of the biomarkers described herein, each of which is selective for a particular biomarker. In some embodiments each of the reagents for detecting is selective for a biomarker selected from the group consisting of: Axl, IL-6r, HCC-4, TIMP-1, HB-EGF, ALP, LAP TGF-b1, EGF, PDGF-BB, OPG, NAP-2, ST2, TNF RI, VEGF, GRO-alpha, and/or LDH. In some embodiments each of the reagents for detecting is selective for a biomarker selected from the group consisting of: Axl, IL-6r, HCC-4, TIMP-1, HB-EGF, ALP, LAP TGF-b1, EGF, PDGF-BB, OPG, NAP-2, ST2, TNF RI, VEGF, and/or GRO-alpha.

[1859] In other embodiments the disclosure provides a test device comprising 1, 2, 3, 4, 5, 6, 7, 8, 9, 10 or more reagents for detecting the activity, expression, or amount of one or more of the biomarkers described herein, each of which is selective for a particular biomarker. In some embodiments each of the reagents for detecting is selective for a biomarker selected from the group consisting of: Axl, IL-6r, HCC-4, TIMP-1, HB-EGF, ALP, LAP TGF-b1, EGF, PDGF-BB, OPG, NAP-2, ST2, TNF RI, VEGF, GRO-alpha, and/or LDH. In some embodiments each of the reagents for detecting is selective for a biomarker selected from the group consisting of: Axl, IL-6r, HCC-4, TIMP-1, HB-EGF, ALP, LAP TGF-b1, EGF, PDGF-BB, OPG, NAP-2, ST2, TNF RI, VEGF, and/or GRO-alpha.

[1860] In some embodiments the diagnostic kit or test device comprises 1, 2, 3, 4, 5, 6, 7, 8, 9, 10 or more specific binding members, each of which selectively binds to one of the biomarkers described herein; and, one or more reagents for detecting said one or more specific binding members, or one or more reagents for detecting and/or quantifying formation of a complex formed by said specific binding member and said biomarker. In some embodiments each specific binding member selectively binds to a biomarker selected from the group consisting of: Axl, IL-6r, HCC-4, TIMP-1, HB-EGF, ALP, LAP TGF-b1, EGF, PDGF-BB, OPG, NAP-2, ST2, TNF RI, VEGF, GRO-alpha, and/or LDH. In some embodiments each specific binding member selectively binds to a biomarker selected from the group consisting of: Axl, IL-6r, HCC-4, TIMP-1, HB-EGF, ALP, LAP TGF-b1, EGF, PDGF-BB, OPG, NAP-2, ST2, TNF RI, VEGF, and/or GRO-alpha.

[1861] In some embodiments the diagnostic kit or test device comprises a specific binding member which selectively binds to Axl, and at least 1, 2, 3, 4, 5, 6, 7, 8, 9, 10, or more specific binding members, each of which selectively binds to a biomarker selected from the group consisting of: IL-6r, HCC-4, TIMP-1, HB-EGF, ALP, LAP TGF-b1, EGF, PDGF-BB, OPG, NAP-2, ST2, TNF RI, VEGF, GRO-alpha, and/or LDH. In some embodiments the diagnostic kit or test device comprises a specific binding member which selectively binds to LDH, and at least 1, 2, 3, 4, 5, 6, 7, 8, 9, 10, or more specific binding members, each of which selectively binds to a biomarker selected from the group consisting of: Axl, IL-6r, HCC-4, TIMP-1, HB-EGF, ALP, LAP TGF-b1, EGF, PDGF-BB, OPG, NAP-2, ST2, TNF RI, VEGF, and/or GRO-alpha.

[1862] In some embodiments the diagnostic kit or test device comprises a specific binding member which selectively binds to Axl, a specific binding member which selectively binds to LDH, and at least 1, 2, 3, 4, 5, 6, 7, 8, 9, 10, or more specific binding members, each of which selectively binds to a biomarker selected from the group consisting of: IL-6r, HCC-4, TIMP-1, HB-EGF, ALP, LAP TGF-b1, EGF, PDGF-BB, OPG, NAP-2, ST2, TNF RI, VEGF, and/or GRO-alpha.

[1863] In some embodiments of this aspect of the disclosure the diagnostic kit or test device comprises a plurality of said specific binding members provided in the form of an array on a substrate or conjugated to a plurality of particles, such as beads or microspheres. The particles may be encoded with a detectable label. In some embodiments the specific binding member comprises an antibody molecule or a binding fragment thereof.

[1864] In some embodiments of the diagnostic kit or test device detecting formation of a complex formed by a specific binding member and a biomarker is carried out by use of a technique selected from: Western blot; enzyme-linked immunosorbent assay (ELISA); radioimmunoassay (RIA); competitive enzyme immunoassay; double antibody sandwich ELISA (DAS-ELISA); liquid immunoarray technology; immunocytochemistry; immunohistochemistry; antibody microarray detection; precipitation of colloidal gold; affinity chromatography; ligand binding assay; and lectin binding assay.

[1865] In some embodiments of the diagnostic kit or test device, the kit or test device comprises no more than 15, 20, 25, 30, 40, or 50 reagents for detecting. In some embodiments of the diagnostic kit or test device, the kit or test device comprises no more than 15, 20, 25, 30, 40, or 50 specific binding members.

[1866] The present disclosure also provides use of such diagnostic kits and test devices in methods of predicting a cancer-related outcome in a subject. In preferred embodiments the cancer-related outcome is susceptibility to treatment with an agent capable of inhibiting or reversing EMT or a chemotherapeutic agent as described herein.

[1867] In some embodiments the agent capable of inhibiting or reversing EMT or chemotherapeutic agent is an Axl inhibitor, Akt3 inhibitor, Slfn11 inhibitor, or PHGDH inhibitor. In some preferred embodiments the agent capable of inhibiting or reversing EMT or chemotherapeutic agent is an Axl inhibitor, for example BGB324/R428/bemcentinib, cabozantinib, TP-0903, foretinib, merestinib, bosutinib, gilteritinib, crizotinib, amuvatinib, sunitinib, sitravatinib, LDC1267, or UNC2025. Other Axl inhibitors include the anti-Axl antibodies described in WO2015/193428, WO2015/193430, WO2016/097370, and WO2016/166296. In some preferred embodiments the Axl inhibitor is an anti-Axl antibody described in WO2015/193428, WO2015/193430, WO2016/097370, or WO2016/166296. In some particularly preferred embodiments the Axl inhibitor is BGB324/R428/bemcentinib.

[1868] In some embodiments of the diagnostic kit or test device for use in a predictive method, the subject has, is suspected of having, or has been diagnosed with melanoma.

[1869] In some embodiments the method may be as defined in accordance with the above described first and second aspects of this facet of the disclosure.

[1870] A fifth aspect of this facet of the present disclosure relates to the use of a reagent for detecting the activity, expression, or amount of a biomarker selected from the group consisting of: Axl, IL-6r, HCC-4, TIMP-1, HB-EGF, ALP, LAP TGF-b1, EGF, PDGF-BB, OPG, NAP-2, ST2, TNF RI, VEGF, GRO-alpha, and/or LDH, in a method of predicting a cancer-related outcome in a subject.

[1871] A sixth aspect of this facet of the disclosure relates to the use of 1, 2, 3, 4, 5, 6, 7, 8, 9, 10 or more reagents for detecting the activity, expression, or amount a biomarker, each of which is selective for a particular biomarker selected from the group consisting of: Axl, IL-6r, HCC-4, TIMP-1, HB-EGF, ALP, LAP TGF-b1, EGF, PDGF-BB, OPG, NAP-2, ST2, TNF RI, VEGF, GRO-alpha, and/or LDH, in a method of manufacture of a diagnostic kit or test device for use in a method of predicting a cancer-related outcome in a subject. In some embodiments of these uses the reagent for detecting comprises a specific binding member selective for a particular biomarker. The specific binding member may comprise an antibody molecule or a binding fragment thereof.

[1872] In some embodiments the method may be as defined in accordance with the above described first and second aspects of this facet of the disclosure.

[1873] Uses

[1874] A seventh aspect of this facet of the present disclosure relates to the use of one or more of: Axl, IL-6r, HCC-4, TIMP-1, HB-EGF, ALP, LAP TGF-b1, EGF, PDGF-BB, OPG, NAP-2, ST2, TNF RI, VEGF, GRO-alpha, and/or LDH, as a biomarker for determining if a subject is susceptible to treatment with an agent capable of inhibiting or reversing EMT or a chemotherapeutic agent.

[1875] In some embodiments the use relates to use of Axl, and at least 1, 2, 3, 4, 5, 6, 7, 8, 9, 10, or more of: IL-6r, HCC-4, TIMP-1, HB-EGF, ALP, LAP TGF-b1, EGF, PDGF-BB, OPG, NAP-2, ST2, TNF RI, VEGF, GRO-alpha, and/or LDH, as a biomarker for determining if a subject is susceptible to treatment with an agent capable of inhibiting or reversing EMT or a chemotherapeutic agent. In some embodiments the use relates to use of LDH, and at least 1, 2, 3, 4, 5, 6, 7, 8, 9, 10, or more of: Axl, IL-6r, HCC-4, TIMP-1, HB-EGF, ALP, LAP TGF-b1, EGF, PDGF-BB, OPG, NAP-2, ST2, TNF RI, VEGF, and/or GRO-alpha, as a biomarker for determining if a subject is susceptible to treatment with an agent capable of inhibiting or reversing EMT or a chemotherapeutic agent.

[1876] In some embodiments the use relates to use of Axl, LDH, and at least 1, 2, 3, 4, 5, 6, 7, 8, 9, 10, or more of: IL-6r, HCC-4, TIMP-1, HB-EGF, ALP, LAP TGF-b1, EGF, PDGF-BB, OPG, NAP-2, ST2, TNF RI, VEGF, and/or GRO-alpha, as a biomarker for determining if a subject is susceptible to treatment with an agent capable of inhibiting or reversing EMT or a chemotherapeutic agent.

[1877] In some embodiments the use is as a biomarker in a method as defined in accordance with the above described first and second aspects of this facet of the disclosure.

[1878] Methods of Treating a Subject

[1879] A eighth aspect of this facet of the present disclosure relates to methods of treating a subject having, suspected of having, or diagnosed with melanoma. In some embodiments the method comprises: identifying a subject for treatment using a predictive method defined in accordance with the above described first and second aspects of this facet of the disclosure; and, administering to the subject a therapeutically effective amount of an agent capable of inhibiting or reversing EMT or a chemotherapeutic agent.

[1880] Accordingly, in some embodiments, the method comprises: (a) obtaining a sample from the subject; (b) determining if the subject is susceptible to treatment with an agent capable of inhibiting or reversing EMT or a chemotherapeutic agent using a predictive method defined in accordance with the above described first and second aspects of this facet of the disclosure; and, (c) administering to the subject a therapeutically effective amount of an agent capable of inhibiting or reversing EMT or a chemotherapeutic agent.

[1881] In some embodiments the method comprises administering a therapeutically effective amount of an agent capable of inhibiting or reversing EMT or chemotherapeutic agent to a subject identified as susceptible to said treatment using a predictive method defined in accordance with the above described first and second aspects of this facet of the disclosure.

[1882] In other embodiments the method comprises: (a) administering to a subject a therapeutically effective amount of an agent capable of inhibiting or reversing EMT or a chemotherapeutic agent; and, (b) determining if the subject is susceptible to said treatment using a predictive method defined in accordance with the above described second aspect of this facet of the disclosure. In some embodiments the method further comprises: (c) administering to the subject one or more further therapeutically effective amounts of an agent capable of inhibiting or reversing EMT or a chemotherapeutic agent provided that the subject is identified as susceptible to said treatment.

[1883] A ninth aspect of this facet of the present disclosure relates to an agent capable of inhibiting or reversing EMT or chemotherapeutic agent for use in a method of treating a subject having, suspected of having, or diagnosed with melanoma. In some embodiments the method of treatment is a method as defined above.

[1884] A tenth aspect of this facet of the present disclosure relates to use of an agent capable of inhibiting or reversing EMT or chemotherapeutic agent for use in a method of manufacture of a medicament for use in a method of treating a subject having, suspected of having, or diagnosed with melanoma. In some embodiments the method of treatment is a method as defined above.

[1885] In some embodiments of these methods, agents for use, or uses, the agent capable of inhibiting or reversing EMT or chemotherapeutic agent comprises an Axl inhibitor, Akt3 inhibitor, Slfn11 inhibitor, or PHGDH inhibitor. In some preferred embodiments the agent capable of inhibiting or reversing EMT or chemotherapeutic agent is an Axl inhibitor, for example BGB324/R428/bemcentinib, cabozantinib, TP-0903, foretinib, merestinib, bosutinib, gilteritinib, crizotinib, amuvatinib, sunitinib, sitravatinib, LDC1267, or UNC2025. Other Axl inhibitors include the anti-Axl antibodies described in WO2015/193428, WO2015/193430, WO2016/097370, and WO2016/166296. In some preferred embodiments the Axl inhibitor is an anti-Axl antibody described in WO2015/193428, WO2015/193430, WO2016/097370, or WO2016/166296. In some particularly preferred embodiments the Axl inhibitor is BGB324/R428/bemcentinib.

[1886] In some other preferred embodiments, the treatment comprises an Akt3 inhibitor. In some embodiments the Akt3 inhibitor is an Akt3 inhibitor disclosed in WO2016/102672.

[1887] In some embodiments of these methods, agents for use, or uses, the treatment is administered as a single agent. In other embodiments, the treatment is administered in combination with a further cancer treatment. Suitable further cancer treatments are outlined in detail above. In some preferred embodiments the further cancer treatment is a PD-1 inhibitor or PD-L1 inhibitor. In some embodiments the further cancer treatment is a monoclonal antibody such as pembrolizumab, alemtuzumab, bevacizumab, cetuximab, ibritumomab tiuxetan, or rituximab, or is a B-Raf inhibitor such as debrafenib, a MEK inhibitor such as trametinib or a combination therapy of these agents. In some particularly preferred embodiments the further cancer treatment is pembrolizumab. In other particularly preferred embodiments the further cancer treatment is a combination therapy of debrafenib and trametinib.

[1888] Statements of Disclosure

[1889] The following numbered statements relate to aspects of this facet of the present disclosure, and form part of the description:
[1890] 101. A method of predicting a cancer-related outcome in a subject, the method comprising assessing the activity, expression, or amount of one or more biomarker in the subject, or in a sample derived from the subject;
   [1891] wherein the one or more biomarker is selected from the group consisting of: Axl, IL-6r, HCC-4, TIMP-1, HB-EGF, ALP, LAP TGF-b1, EGF, PDGF-BB, OPG, NAP-2, ST2, TNF RI, VEGF, GRO-alpha, and/or LDH; and
   [1892] wherein the subject has, is suspected of having, or has been diagnosed with melanoma.
[1893] 102. A method according to statement 101, wherein the method comprises:
   [1894] assessing the activity, expression, or amount of one or more biomarker in the subject, or in a sample derived from the subject, to obtain a sample profile of the one or more biomarker; and
   [1895] making a prediction based on the sample profile of the one or more biomarker.
[1896] 103. A method according to statement 102, wherein the prediction is made by comparing the sample profile to a control profile.
[1897] 104. A method according to statement 103, wherein the sample profile is obtained before the subject is contacted with or administered an agent capable of inhibiting or reversing EMT or a chemotherapeutic agent.
[1898] 105. A method according to statement 104, wherein the control profile is:
   [1899] (i) obtained from a population of control subjects having melanoma; or
   [1900] (ii) obtained from a control subject or population of control subjects having melanoma and previously found to lack susceptibility to treatment with an agent capable of inhibiting or reversing EMT or a chemotherapeutic agent (that is, non-responder subjects);
   [1901] (iii) a predetermined profile of biomarker expression, activity, or amount values, for example a profile of “average, median, or mean” values or “standard ranges” of values, obtained from a control subject or population of control subjects having melanoma and previously found to lack susceptibility to treatment with an agent capable of inhibiting or reversing EMT or a chemotherapeutic agent (that is, non-responder subjects);
   [1902] (iv) obtained from a control sample having a known “average, median, or mean” value of biomarkers indicative of a control subject or population of control subjects having melanoma and previously found to lack susceptibility to treatment with an agent capable of inhibiting or reversing EMT or a chemotherapeutic agent (that is, non-responder subjects);
   [1903] (v) a predetermined profile of biomarker expression, activity, or amount “threshold” values obtained from a control subject or population of control subjects having melanoma and previously found to be susceptible to treatment with an agent capable of inhibiting or reversing EMT or a chemotherapeutic agent (that is, responder subjects); or
   [1904] (vi) obtained from a control sample having a known “threshold” value of biomarkers indicative of a control subject or population of control subjects having melanoma and previously found to be susceptible to treatment with an agent capable of inhibiting or reversing EMT or a chemotherapeutic agent (that is, responder subjects).
[1905] 106. A method according to statement 105, wherein a higher activity, expression, or amount of one or more biomarker in the sample profile as compared with the control profile is indicative of susceptibility to treatment with an agent capable of inhibiting or reversing EMT or a chemotherapeutic agent.
[1906] 107. A method according to statement 105, wherein a lower activity, expression, or amount of one or more biomarker in the sample profile as compared with the control profile is indicative of susceptibility to treatment with an agent capable of inhibiting or reversing EMT or a chemotherapeutic agent.
[1907] 108. A method according to any one of statements 105-107, wherein the one or more biomarker includes at least one of: TIMP-1, HB-EGF, ALP, LAP TGF-b1, EGF, PDGF-BB, OPG, NAP-2, ST2, TNF RI, VEGF, GRO-alpha, and/or LDH,
   [1908] and wherein a higher activity, expression, or amount of one or more of said biomarkers in the sample profile as compared with the control profile is indicative of susceptibility to treatment with an agent capable of inhibiting or reversing EMT or a chemotherapeutic agent.
[1909] 109. A method according to any one of statements 105-108, wherein the one or more biomarker includes at least one of: Axl, IL-6r, and/or HCC-4,
   [1910] and wherein a lower activity, expression, or amount of one or more of said biomarkers in the sample profile as compared with the control profile is indicative of susceptibility to treatment with an agent capable of inhibiting or reversing EMT or a chemotherapeutic agent.
[1911] 110. A method according to any one of statements 105-109, wherein:
   [1912] a lower activity, expression, or amount of Axl; and/or
   [1913] a lower activity, expression, or amount of IL-6r; and/or
   [1914] a lower activity, expression, or amount of HCC-4; and/or
   [1915] a higher activity, expression, or amount of TIMP-1; and/or
   [1916] a higher activity, expression, or amount of HB-EGF; and/or
   [1917] a higher activity, expression, or amount of ALP; and/or
   [1918] a higher activity, expression, or amount of LAP TGF-b1; and/or
   [1919] a higher activity, expression, or amount of EGF; and/or
   [1920] a higher activity, expression, or amount of PDGF-BB; and/or
   [1921] a higher activity, expression, or amount of OPG; and/or
   [1922] a higher activity, expression, or amount of NAP-2; and/or
   [1923] a higher activity, expression, or amount of ST2; and/or
   [1924] a higher activity, expression, or amount of TNF RI; and/or
   [1925] a higher activity, expression, or amount of VEGF; and/or
   [1926] a higher activity, expression, or amount of GRO-alpha; and/or
   [1927] a higher activity, expression, or amount of LDH;
   [1928] in the sample profile as compared with the control profile is indicative of susceptibility to treatment with an agent capable of inhibiting or reversing EMT or a chemotherapeutic agent.
[1929] 111. A method according to any one of statements 101-110, wherein the one or more biomarker comprises Axl, and/or LDH
   [1930] optionally wherein the one or more biomarker comprises Axl and at least 1, 2, 3, 4, 5, 6, 7, 8, 9, 10, or more further biomarkers selected from: IL-6r, HCC-4, TIMP-1, HB-EGF, ALP, LAP TGF-b1, EGF, PDGF-BB, OPG, NAP-2, ST2, TNF RI, VEGF, GRO-alpha, and/or LDH.
[1931] 112. A method according to any one of statements 101-111, wherein:
   [1932] said Axl biomarker comprises an amino acid sequence having at least 70%, 80%, 90%, 95%, 99% or 100% sequence identity with the full-length of the amino acid sequence disclosed at UniProt accession no: P30530-1 or P30530-2 (entry version 196) or a fragment thereof;
   [1933] said Interleukin-6 receptor (IL-6r) biomarker comprises an amino acid sequence having at least 70%, 80%, 90%, 95%, 99% or 100% sequence identity with the full-length of the amino acid sequence disclosed at UniProt accession no: P08887-1 or P08887-2 (entry version 210) or a fragment thereof;
   [1934] said Chemokine CC-4 (HCC-4) biomarker comprises an amino acid sequence having at least 70%, 80%, 90%, 95%, 99% or 100% sequence identity with the full-length of the amino acid sequence disclosed at UniProt accession no: 015467 (entry version 146) or a fragment thereof;
   [1935] said Tissue Inhibitor of Metalloproteinases 1 (TIMP-1) biomarker comprises an amino acid sequence having at least 70%, 80%, 90%, 95%, 99% or 100% sequence identity with the full-length of the amino acid sequence disclosed at UniProt accession no: P01033 (entry version 202) or a fragment thereof;
   [1936] said Heparin-Binding EGF-Like Growth Factor (HB-EGF) biomarker comprises an amino acid sequence having at least 70%, 80%, 90%, 95%, 99% or 100% sequence identity with the full-length of the amino acid sequence disclosed at UniProt accession no: Q99075 (entry version 171) or a fragment thereof;
   [1937] said Antileukoproteinase (ALP) biomarker comprises an amino acid sequence having at least 70%, 80%, 90%, 95%, 99% or 100% sequence identity with the full-length of the amino acid sequence disclosed at UniProt accession no: P03973 (entry version 184) or a fragment thereof;
   [1938] said Latency-Associated Peptide of Transforming Growth Factor beta 1 (LAP TGF-b1) biomarker comprises an amino acid sequence having at least 70%, 80%, 90%, 95%, 99% or 100% sequence identity with the full-length of the amino acid sequence disclosed at UniProt accession no: P01137 (entry version 235) or a fragment thereof;
   [1939] said Epidermal Growth Factor (EGF) biomarker comprises an amino acid sequence having at least 70%, 80%, 90%, 95%, 99% or 100% sequence identity with the full-length of the amino acid sequence disclosed at UniProt accession no: P01133-1, P01133-2, or P01133-3 (entry version 204) or a fragment thereof;
   [1940] said Platelet-Derived Growth Factor BB (PDGF-BB) biomarker comprises an amino acid sequence having at least 70%, 80%, 90%, 95%, 99% or 100% sequence identity with the full-length of the amino acid sequence disclosed at UniProt accession no: P01127-1 or P01127-2 (entry version 217) or a fragment thereof;
   [1941] said Osteoprotegerin (OPG) biomarker comprises an amino acid sequence having at least 70%, 80%, 90%, 95%, 99% or 100% sequence identity with the full-length of the amino acid sequence disclosed at UniProt accession no: 000300 (entry version 155) or a fragment thereof;
   [1942] said Neutrophil Activating Peptide 2 (NAP-2) biomarker comprises an amino acid sequence having at least 70%, 80%, 90%, 95%, 99% or 100% sequence identity with the full-length of the amino acid sequence disclosed at UniProt accession no: P02775 (entry version 191) or a fragment thereof;
   [1943] said ST2 biomarker comprises an amino acid sequence having at least 70%, 80%, 90%, 95%, 99% or 100% sequence identity with the full-length of the amino acid sequence disclosed at UniProt accession no: Q01638-1, Q01638-2, Q01638-3, or Q01638-4 (entry version 179) or a fragment thereof;
   [1944] said Tumor Necrosis Factor Receptor I (TNF RI) biomarker comprises an amino acid sequence having at least 70%, 80%, 90%, 95%, 99% or 100% sequence identity with the full-length of the amino acid sequence disclosed at UniProt accession no: P19438-1, P19438-2, P19438-3, P19438-4, or P19438-5 (entry version 225) or a fragment thereof;
   [1945] said Vascular Endothelial Growth Factor (VEGF) biomarker comprises an amino acid sequence having at least 70%, 80%, 90%, 95%, 99% or 100% sequence identity with the full-length of the amino acid sequence disclosed at UniProt accession no: P15692-1, P15692-2, P15692-3, P15692-4, P15692-5, P15692-6, P15692-7, P15692-8, P15692-9, P15692-10, P15692-11, P15692-12, P15692-13, P15692-14, P15692-15, P15692-16, P15692-17, or P15692-18 (entry version 230) or a fragment thereof;
   [1946] said Growth-Regulated alpha protein (GRO-alpha) biomarker comprises an amino acid sequence having at least 70%, 80%, 90%, 95%, 99% or 100% sequence identity with the full-length of the amino acid sequence disclosed at UniProt accession no: P09341 (entry version 183) or a fragment thereof;
   [1947] said Lactate Dehydrogenase (LDH) biomarker comprises an amino acid sequence having at least 70%, 80%, 90%, 95%, 99% or 100% sequence identity with the full-length of the amino acid sequence disclosed at UniProt accession no: P00338-1, P00338-2, P00338-3, P00338-4, or P00338-5 (entry version 224) or a fragment thereof;
   [1948] said Lactate Dehydrogenase (LDH) biomarker comprises an amino acid sequence having at least 70%, 80%, 90%, 95%, 99% or 100% sequence identity with the full-length of the amino acid sequence disclosed at UniProt accession no: P07195-1 (entry version 218) or a fragment thereof;
      or a nucleic acid (either DNA or RNA) having at least 70%, 80%, 90%, 95%, 99% or 100% sequence identity with the full-length nucleic acid sequence encoding said amino acid sequences.
[1949] 113. A method according to any one of statement 101-112, wherein the method comprises determining the amount of at least 2, 3, 4, 5, 6, 7, 8, 9, 10, 11, 12, 13, 14, 15, 20 of said biomarkers in the subject, or sample derived from the subject.
[1950] 114. A method according to any one of statements 104-113, wherein assessing the activity, expression, or amount of one or more biomarker in the subject, or in a sample derived from the subject, comprises:
   [1951] contacting a sample, or an extract from the sample, with at least 1, 2, 3, 4, 5, 6, 7, 8, 9, 10 or more reagents for detecting the activity, expression, or amount of one or more biomarkers, each of which is selective for a particular biomarker; and
   [1952] detecting and/or quantifying said reagents for detecting.
[1953] 115. A method according to statement 114, wherein assessing the expression or amount of one or more biomarker in the subject, or in a sample derived from the subject, comprises:
   [1954] contacting a sample, or an extract from the sample, with at least 1, 2, 3, 4, 5, 6, 7, 8, 9, 10 or more specific binding members, each of which selectively binds to a respective biomarker protein or mRNA; and
   [1955] detecting and/or quantifying formation of complex formed by said specific binding member and said biomarker protein or mRNA.
[1956] 116. A method according to statement 115 wherein the specific binding member comprises an antibody molecule or binding fragment thereof.
[1957] 117. A method according to statement 115 or 116, wherein detecting formation of a complex formed by the specific binding member and the biomarker protein or mRNA is carried out by use of a technique selected from: Western blot; enzyme-linked immunosorbent assay (ELISA); radioimmunoassay (RIA); competitive enzyme immunoassay; double antibody sandwich ELISA (DAS-ELISA); liquid immunoarray technology; immunocytochemistry; immunohistochemistry; antibody microarray detection; precipitation of colloidal gold; affinity chromatography; ligand binding assay; and lectin binding assay.
[1958] 118. A method according to any one of statements 115-117 wherein the expression or amount of the one or more biomarker is determined as the absolute amount of the respective biomarker protein or mRNA in the sample.
[1959] 119. A method according to any one of statements 115-117 wherein the expression or amount of the one or more biomarker is determined as a relative amount of the respective biomarker protein or mRNA in the sample,
   [1960] optionally wherein the relative amount is determined relative to a reference protein or mRNA in the sample, the expression of which is not altered by melanoma.
[1961] 120. A method according to any one of statements 101-119, wherein the cancer-related outcome is susceptibility to treatment with an agent capable of inhibiting or reversing EMT or a chemotherapeutic agent.
[1962] 121. A method according to statement 120, wherein the agent capable of inhibiting or reversing EMT or chemotherapeutic agent is an Axl inhibitor, Akt3 inhibitor, Slfn11 inhibitor, or PHGDH inhibitor.
[1963] 122. A method according to statement 121, wherein the agent capable of inhibiting or reversing EMT or chemotherapeutic agent is an Axl inhibitor.
[1964] 123. A method according to statement 122, wherein the Axl inhibitor is BGB324/R428/bemcentinib, cabozantinib, TP-0903, foretinib, merestinib, bosutinib, gilteritinib, crizotinib, amuvatinib, sunitinib, sitravatinib, LDC1267, UNC2025, or an anti-Axl antibody described in WO2015/193428, WO2015/193430, WO2016/097370, or WO2016/166296.
[1965] 124. A method according to statement 123, wherein the Axl inhibitor is BGB324/R428/bemcentinib.
[1966] 125. A method according to statement 123, wherein the Axl inhibitor is an anti-Axl antibody described in WO2015/193428, WO2015/193430, WO2016/097370, or WO2016/166296.
[1967] 126. A method according to statement 121, wherein the agent capable of inhibiting or reversing EMT or chemotherapeutic agent is an Akt3 inhibitor.
[1968] 127. A method according to statement 126, wherein the Akt3 inhibitor is an Akt3 inhibitor disclosed in WO2016/102672.
[1969] 128. A method according to any one of statements 120-127, wherein the agent capable of inhibiting or reversing EMT is administered as a single agent.
[1970] 129. A method according to any one of statements 120-127, wherein the agent capable of inhibiting or reversing EMT is administered in combination with a further cancer treatment.
[1971] 130. A method according to statement 129, wherein the further cancer treatment is selected from:
   [1972] (i) alkylating agents, including alkyl sulfonates such as busulfan;
   [1973] (ii) nitrogen mustards such as chlorambucil, cyclophosphamide, estramustine, ifosfamide, mechlorethamine, melphalan, and uramustine;
   [1974] (iii) ethyleneimine derivatives such as thiotepa;
   [1975] (iv) nitrosoureas such as carmustine, lomustine, and streptozocin;
   [1976] (v) triazenes such as dacarbazine, procarbazine, and temozolamide;
   [1977] (vi) platinum compounds such as cisplatin, carboplatin, oxaliplatin, satraplatin, and picoplatin onnaplatin, tetraplatin, sprioplatin, iproplatin, chloro(diethylenediamino)-platinum (II) chloride, dichloro(ethylenediamino)-platinum (II), diamino(2-ethylmalonato)platinum (II), (1,2-diaminocyclohexane)malonatoplatinum (II), (4-carboxyphthalo)-(1,2-diaminocyclohexane)platinum (II), (1,2-diaminocyclohexane)-(isocitrato)platinum (II), and (1,2-diaminocyclohexane)-cis-(pyruvato)platinum (II);
   [1978] (vii) antimetabolites, including antifolates such as methotrexate, permetrexed, raltitrexed, and trimetrexate;
   [1979] (viii) pyrimidine analogues such as azacitidine, capecitabine, cytarabine, edatrexate, floxuridine, fluorouracil, gemcitabine, and troxacitabine;
   [1980] (ix) purine analogues such as cladribine, chlorodeoxyadenosine, clofarabine, fludarabine, mercaptopurine, pentostatin, and thioguanine;
   [1981] (x) natural products, including antitumor antibiotics such as bleomycin, dactinomycin, mithramycin, mitomycin, mitoxantrone, porfiromycin;
   [1982] (xi) anthracyclines such as daunorubicin, doxorubicin, epirubicin, idarubicin, and valrubicin;
   [1983] (xii) mitotic inhibitors such as the vinca alkaloids vinblastine, vinvesir, vincristine, vindesine, and vinorelbine;
   [1984] (xiii) enzymes such as L-asparaginase and PEG-L-asparaginase;
   [1985] (xiv) microtubule polymer stabilizers such as the taxanes paclitaxel and docetaxel;
   [1986] (xv) topoisomerase I inhibitors such as the camptothecins irinotecan and topotecan;
   [1987] (xvi) topoisomerase II inhibitors such as podophyllotoxin, amsacrine, etoposide, teniposide, losoxantrone and actinomycin;
   [1988] (xvii) hormones and hormone antagonists, including
      [1989] androgens such as fluoxymesterone and testolactone;
      [1990] antiandrogens such as bicalutamide, cyproterone, flutamide, and nilutamide;
      [1991] corticosteroids such as dexamethasone and prednisone;
      [1992] aromatase inhibitors such as aminoglutethimide, anastrozole, exemestane, formestane, and letrozole;
      [1993] estrogens such as diethylstilbestrol;
      [1994] antiestrogens such as fulvestrant, raloxifene, tamoxifen, and toremifine;
      [1995] luteinising hormone-releasing hormone (LHRH) agonists and antagonists such as abarelix, buserelin, goserelin, leuprolide, histrelin, desorelin, nafarelin acetate and triptorelin;
      [1996] progestins such as medroxyprogesterone acetate and megestrol acetate; and
      [1997] thyroid hormones such as levothyroxine and liothyronine;
   [1998] (xviii) PKB pathway inhibitors, including perifosine, enzastaurin hydrochloride, and triciribine;
   [1999] (xix) P13K inhibitors such as semaphore and SF1126, and MTOR inhibitors such as rapamycin and analogues;
   [2000] (xx) CDK inhibitors, including seliciclib, alvocidib, and 7-hydroxystaurosporine;
   [2001] (xxi) COX-2 inhibitors, including celecoxib;
   [2002] (xxii) HDAC inhibitiors, including trichostatin A, suberoylanilide hydroxamic acid, and chlamydocin;
   [2003] (xxiii) DNA methylase inhibitors, including temozolomide, and miscellaneous agents, including altretamine, arsenic trioxide, thalidomide, lenalidomide, gallium nitrate, levamisole, mitotane, hydroxyurea, octreotide, procarbazine, suramin, photodynamic compounds such as methoxsalen and sodium porfimer;
   [2004] (xxiv) proteasome inhibitors such as bortezomib;
   [2005] (xxv) molecular targeted therapy agents including: functional therapeutic agents, including gene therapy agents and antisense therapy agents;
   [2006] (xxvi) tyrosine kinase inhibitors such as erlotinib hydrochloride, gefitinib, imatinib mesylate, and semaxanib;
   [2007] (xxvii) Raf inhibitors such as sorafenib, and gene expression modulators such as the retinoids and rexinoids, for example adapalene, bexarotene, trans-retinoic acid, 9-cis-retinoic acid, and N-(4-hydroxyphenyl)retinamide;
   [2008] (xxviii) phenotype-directed therapy agents, including monoclonal antibodies such as pembrolizumab, alemtuzumab, bevacizumab, cetuximab, ibritumomab tiuxetan, rituximab, and trastuzumab, immunotoxins such as gemtuzumab ozogamicin, radioimmunoconjugates such as I-tositumobab;
   [2009] (xxix) cancer vaccines;
   [2010] (xxx) biologic therapy agents including: interferons such as interferon-[alpha]2a and interferon-[alpha]2b, and interleukins such as aldesleukin, denileukin diftitox, and oprelvekin; (xxxi) anticancer therapies involving the use of protective or adjunctive agents, including: cytoprotective agents such as amifostine, and dexrazoxane, phosphonates such as pamidronate and zoledronic acid, and stimulating factors such as epoetin, darbeopetin, filgrastim, PEG-filgrastim, and sargramostim;
   [2011] (xxxii) Axl inhibitors such as 1-(6,7-dihydro-5H-benzo[6,7]cyclohepta[1,2-c]pyridazin-3-yl)-N3-((7-(S)-pyrrolidin-1-yl)-6,7,8,9-tetrahydro-5H-benzo[7]annulene-2-yl)-1H-1,2,4-triazole-3,5-diamine; and/or
   [2012] (xxxiii) further combination chemotherapeutic regimens, such as combinations of carboplatin/paclitaxel, capecitabine/docetaxel, fluorauracil/levamisole, fluorauracil/leucovorin, methotrexate/leucovorin, and trastuzumab/paclitaxel, alone or in further combination with carboplatin.
[2013] 131. A method according to statement 129, wherein the further cancer treatment is a monoclonal antibody such as pembrolizumab, alemtuzumab, bevacizumab, cetuximab, ibritumomab tiuxetan, or rituximab, or is a B-Raf inhibitor such as debrafenib, a MEK inhibitor such as trametinib or a combination therapy of these agents.
[2014] 132. A method according to statement 131, wherein the further cancer treatment is pembrolizumab.
[2015] 133. A method according to statement 131, wherein the further cancer treatment is a combination therapy of debrafenib and trametinib.
[2016] 134. A method according to any one of statements 101-133, wherein the subject is mammalian.
[2017] 135. A method according to statement 134, wherein the subject is human.
[2018] 136. A method according to any one of statements 101-135, wherein the predictive method is performed before the subject receives a treatment or course of treatment for melanoma.
[2019] 137. A method according to any one of statement 101-136, wherein the predictive method is performed during or after a treatment or course of treatment for melanoma.
[2020] 138. A method according to any one of statements 101-135 or 137, wherein the subject has previously been treated with an agent capable of inhibiting or reversing EMT or a chemotherapeutic agent.
[2021] 139. A method according to statement 138, wherein the subject has previously been treated with an agent selected from: a PHGDH inhibitor, a Slfn11 inhibitor, an Axl inhibitor, or an Akt3 inhibitor.
[2022] 140. A method according to any one of statements 138-139, wherein the subject has previously been treated with an agent that is different to the agent capable of inhibiting or reversing EMT or chemotherapeutic agent for which the subject's susceptibility is being predicted.
[2023] 141. A method according to any one of statements 101-136, wherein the subject has not previously been treated with an agent capable of inhibiting or reversing EMT or a chemotherapeutic agent.
[2024] 142. A method according to statement 141, wherein the subject has not previously been treated with an Axl inhibitor.
[2025] 143. A method according to statement 141, wherein the subject has not previously been treated with an Akt3 inhibitor.
[2026] 144. A method according to any one of statements 101-143, wherein the sample is selected from: blood, serum, plasma, tissue biopsy, culture supernatant, or urine.
[2027] 145. A method according to statement 144, wherein the sample is a blood, serum, or plasma sample.
[2028] 146. A method according to statement 145, wherein the sample is a serum sample.
[2029] 147. A method according to any one of statements 104-146, wherein the method further comprises a subsequent step of assessing the activity, expression, or amount of one or more biomarker in the subject, in which a sample profile is obtained after contacting the subject with an agent capable of inhibiting or reversing EMT or a chemotherapeutic agent.
[2030] 148. A method according to statement 103, wherein the sample profile is obtained after contacting the subject with an agent capable of inhibiting or reversing EMT or a chemotherapeutic agent.
[2031] 149. A method according to statement 147 or 148, wherein the control profile is obtained from the same subject prior to contacting said subject with the agent capable of inhibiting or reversing EMT or a chemotherapeutic agent.
[2032] 150. A method according to statement 149, wherein an increase in the activity, expression, or amount of one or more biomarker in the sample profile as compared with the control profile is indicative of higher susceptibility to treatment with an agent capable of inhibiting or reversing EMT or a chemotherapeutic agent.
[2033] 151. A method according to statement 149, wherein a decrease in the activity, expression, or amount of one or more biomarker in the sample profile as compared with the control profile is indicative of higher susceptibility to treatment with an agent capable of inhibiting or reversing EMT or a chemotherapeutic agent.
[2034] 152. A method according to statement 149, wherein an increase in the activity, expression, or amount of one or more biomarker in the sample profile as compared with the control profile is indicative of lower susceptibility to treatment with an agent capable of inhibiting or reversing EMT or a chemotherapeutic agent.
[2035] 153. A method according to statement 149, wherein a decrease in the activity, expression, or amount of one or more biomarker in the sample profile as compared with the control profile is indicative of lower susceptibility to treatment with an agent capable of inhibiting or reversing EMT or a chemotherapeutic agent.
[2036] 154. A method according to statement 150, wherein the one or more biomarker includes at least Axl.
[2037] 155. A method according to any one of statements 147-154, wherein assessing the activity, expression, or amount of one or more biomarker in the subject, or in a sample derived from the subject, comprises:
   [2038] contacting a sample, or an extract from the sample, with at least 1, 2, 3, 4, 5, 6, 7, 8, 9, 10 or more reagents for detecting the activity, expression, or amount of one or more biomarkers, each of which is selective for a particular biomarker; and
   [2039] detecting and/or quantifying said reagents for detecting.
[2040] 156. A method according to statement 155, wherein assessing the expression or amount of one or more biomarker in the subject, or in a sample derived from the subject, comprises:
   [2041] contacting a sample, or an extract from the sample, with at least 1, 2, 3, 4, 5, 6, 7, 8, 9, 10 or more specific binding members, each of which selectively binds to a respective biomarker protein or mRNA; and
   [2042] detecting and/or quantifying formation of a complex formed by said specific binding member and said biomarker protein or mRNA.
[2043] 157. A method according to statement 156, wherein the specific binding member comprises an antibody molecule or binding fragment thereof.
[2044] 158. A method according to statement 156 or 157, wherein detecting formation of a complex formed by the specific binding member and the biomarker protein or mRNA is carried out by use of a technique selected from: Western blot; enzyme-linked immunosorbent assay (ELISA); radioimmunoassay (RIA); competitive enzyme immunoassay; double antibody sandwich ELISA (DAS-ELISA); liquid immunoarray technology; immunocytochemistry; immunohistochemistry; antibody microarray detection; precipitation of colloidal gold; affinity chromatography; ligand binding assay; and lectin binding assay.
[2045] 159. A method according to any one of statements 156-158 wherein the expression or amount of the one or more biomarker is determined as the absolute amount of the respective biomarker protein or mRNA in the sample.
[2046] 160. A method according to any one of statements 156-158 wherein the expression or amount of the one or more biomarker is determined as a relative amount of the respective biomarker protein or mRNA in the sample,
   [2047] optionally wherein the relative amount is determined relative to a reference protein or mRNA in the sample, the expression of which is not altered by melanoma.
[2048] 161. A method according to any one of statements 148-160, wherein the agent capable of inhibiting or reversing EMT or chemotherapeutic agent is an Axl inhibitor, Akt3 inhibitor, Slfn11 inhibitor, or PHGDH inhibitor.
[2049] 162. A method according to statement 161, wherein the agent capable of inhibiting or reversing EMT or chemotherapeutic agent is an Axl inhibitor.
[2050] 163. A method according to statement 162, wherein the Axl inhibitor is BGB324/R428/bemcentinib, cabozantinib, TP-0903, foretinib, merestinib, bosutinib, gilteritinib, crizotinib, amuvatinib, sunitinib, sitravatinib, LDC1267, UNC2025, or an anti-Axl antibody described in WO2015/193428, WO2015/193430, WO2016/097370, or WO2016/166296.
[2051] 164. A method according to statement 163, wherein the Axl inhibitor is BGB324/R428/bemcentinib.
[2052] 165. A method according to statement 163, wherein the Axl inhibitor is an anti-Axl antibody described in WO2015/193428, WO2015/193430, WO2016/097370, or WO2016/166296.
[2053] 166. A method according to statement 161, wherein the agent capable of inhibiting or reversing EMT or chemotherapeutic agent is an Akt3 inhibitor.
[2054] 167. A method according to statement 166, wherein the Akt3 inhibitor is an Akt3 inhibitor disclosed in WO2016/102672.
[2055] 168. A method according to any one of statements 161-167, wherein the agent capable of inhibiting or reversing EMT is administered as a single agent.
[2056] 169. A method according to any one of statements 161-167, wherein the agent capable of inhibiting or reversing EMT is administered in combination with a further cancer treatment.
[2057] 170. A method according to statement 169, wherein the further cancer treatment is selected from the further cancer treatments listed in statement 130.
[2058] 171. A method according to statement 169, wherein the further cancer treatment is a monoclonal antibody such as pembrolizumab, alemtuzumab, bevacizumab, cetuximab, ibritumomab tiuxetan, or rituximab, or is a B-Raf inhibitor such as debrafenib, a MEK inhibitor such as trametinib or a combination therapy of these agents.
[2059] 172. A method according to statement 171, wherein the further cancer treatment is pembrolizumab.
[2060] 173. A method according to statement 171, wherein the further cancer treatment is a combination therapy of debrafenib and trametinib.
[2061] 174. A method according to any one of statements 148-173, wherein the subject is mammalian.
[2062] 175. A method according to statement 174, wherein the subject is human.
[2063] 176. A method according to any one of statements 148-175, wherein the subject was selected for treatment with the agent capable of inhibiting or reversing EMT or a chemotherapeutic agent, using a predictive method according to any one of statements 101-147.
[2064] 177. A method according to any one of statements 148-176, wherein the sample is selected from: blood, serum, plasma, tissue biopsy, culture supernatant, or urine.
[2065] 178. A method according to statement 177, wherein the sample is a blood, serum, or plasma sample.
[2066] 179. A method according to statement 178, wherein the sample is a serum sample.
[2067] 180. A method according to any one of statements 1-179, wherein the method is performed in vitro or ex vivo.
[2068] 201. A method of selecting subjects having, suspected of having, or diagnosed with melanoma for treatment with an agent capable of inhibiting or reversing EMT or a chemotherapeutic agent, the method comprising:
   [2069] identifying subjects susceptible to treatment with an agent capable of inhibiting or reversing EMT or a chemotherapeutic agent using a method according to any one of statements 101-180; and
   [2070] selecting thus identified subjects for treatment.
[2071] 202. A method of selecting subjects having, suspected of having, or diagnosed with melanoma for continued treatment with an agent capable of inhibiting or reversing EMT or a chemotherapeutic agent, the method comprising:
   [2072] identifying subjects susceptible to treatment with an agent capable of inhibiting or reversing EMT or a chemotherapeutic agent using a method according to any one of statements 148-180; and selecting thus identified subjects for treatment.
[2073] 203. A method according to any one of statements 201-202, wherein treatment comprises administering to the subject a therapeutically effective amount of an agent capable of inhibiting or reversing EMT or a chemotherapeutic agent.
[2074] 204. A method according to statement 203, wherein the treatment comprises an Axl inhibitor, Akt3 inhibitor, Slfn11 inhibitor, or PHGDH inhibitor.
[2075] 205. A method according to statement 204, wherein the treatment comprises an Axl inhibitor.
[2076] 206. A method according to statement 205, wherein the Axl inhibitor is BGB324/R428/bemcentinib, cabozantinib, TP-0903, foretinib, merestinib, bosutinib, gilteritinib, crizotinib, amuvatinib, sunitinib, sitravatinib, LDC1267, UNC2025, or an anti-Axl antibody described in WO2015/193428, WO2015/193430, WO2016/097370, or WO2016/166296.
[2077] 207. A method according to statement 206, wherein the Axl inhibitor is BGB324/R428/bemcentinib.
[2078] 208. A method according to statement 206, wherein the Axl inhibitor is an anti-Axl antibody described in WO2015/193428, WO2015/193430, WO2016/097370, or WO2016/166296.
[2079] 209. A method according to statement 204, wherein the treatment comprises an Akt3 inhibitor.
[2080] 210. A method according to statement 209, wherein the Akt3 inhibitor is an Akt3 inhibitor disclosed in WO2016/102672.
[2081] 211. A method according to any one of statements 203-210, wherein the treatment is administered as a single agent.
[2082] 212. A method according to any one of statements 203-211, wherein the treatment is administered in combination with a further cancer treatment.
[2083] 213. A method according to statement 212, wherein the further cancer treatment is selected from the further cancer treatments listed in statement 130.
[2084] 214. A method according to statement 212, wherein the further cancer treatment is a monoclonal antibody such as pembrolizumab, alemtuzumab, bevacizumab, cetuximab, ibritumomab tiuxetan, or rituximab, or is a B-Raf inhibitor such as debrafenib, a MEK inhibitor such as trametinib or a combination therapy of these agents.
[2085] 215. A method according to statement 214, wherein the further cancer treatment is pembrolizumab.
[2086] 216. A method according to statement 214, wherein the further cancer treatment is a combination therapy of debrafenib and trametinib.
[2087] 301. A diagnostic kit comprising 1, 2, 3, 4, 5, 6, 7, 8, 9, 10 or more reagents for detecting the activity, expression, or amount of one or more biomarkers, each of which is selective for a particular biomarker selected from the group consisting of: Axl, IL-6r, HCC-4, TIMP-1, HB-EGF, ALP, LAP TGF-b1, EGF, PDGF-BB, OPG, NAP-2, ST2, TNF RI, VEGF, GRO-alpha, and/or LDH.
[2088] 302. A test device comprising 1, 2, 3, 4, 5, 6, 7, 8, 9, 10 or more reagents for detecting the activity, expression, or amount of one or more biomarkers, each of which is selective for a particular biomarker selected from the group consisting of: Axl, IL-6r, HCC-4, TIMP-1, HB-EGF, ALP, LAP TGF-b1, EGF, PDGF-BB, OPG, NAP-2, ST2, TNF RI, VEGF, GRO-alpha, and/or LDH.
[2089] 303. A diagnostic kit or test device according to any one of statements 301 or 302, comprising:
   [2090] 1, 2, 3, 4, 5, 6, 7, 8, 9, 10 or more specific binding members, each of which selectively binds to a biomarker selected from the group consisting of: Axl, IL-6r, HCC-4, TIMP-1, HB-EGF, ALP, LAP TGF-b1, EGF, PDGF-BB, OPG, NAP-2, ST2, TNF RI, VEGF, GRO-alpha, and/or LDH; and
   [2091] one or more reagents for detecting said one or more specific binding members or one or more reagents for detecting and/or quantifying formation of a complex formed by said specific binding member and said biomarker.
[2092] 304. A diagnostic kit or test device according to statement 303, wherein the specific binding member comprises an antibody molecule or binding fragment thereof.
[2093] 305. A diagnostic kit or test device according to statement 303 or 304, wherein detecting formation of a complex formed by the specific binding member and the biomarker is carried out by use of a technique selected from: Western blot; enzyme-linked immunosorbent assay (ELISA); radioimmunoassay (RIA); competitive enzyme immunoassay; double antibody sandwich ELISA (DAS-ELISA); liquid immunoarray technology; immunocytochemistry; immunohistochemistry; antibody microarray detection; precipitation of colloidal gold; affinity chromatography; ligand binding assay; and lectin binding assay.
[2094] 306. A diagnostic kit or test device according to any one of statements 301-305, wherein the kit or test device comprises no more than 15, 20, 25, 30, 40, or 50 reagents for detecting.
[2095] 307. A diagnostic kit or test device according to any one of statements 301-306 for use in a method of predicting a cancer-related outcome in a subject.
[2096] 308. A diagnostic kit for use, or test device for use, according to statement 307, wherein the cancer-related outcome is susceptibility to treatment with an agent capable of inhibiting or reversing EMT or a chemotherapeutic agent.
[2097] 309. A diagnostic kit for use, or test device for use, according to statement 308, wherein the agent capable of inhibiting or reversing EMT or chemotherapeutic agent is an Axl inhibitor, Akt3 inhibitor, Slfn11 inhibitor, or PHGDH inhibitor.
[2098] 310. A diagnostic kit for use, or test device for use, according to statement 308, wherein the agent capable of inhibiting or reversing EMT or chemotherapeutic agent is an Axl inhibitor.
[2099] 311. A diagnostic kit for use, or test device for use, according to statement 310, wherein the Axl inhibitor is BGB324/R428/bemcentinib, cabozantinib, TP-0903, foretinib, merestinib, bosutinib, gilteritinib, crizotinib, amuvatinib, sunitinib, sitravatinib, LDC1267, UNC2025, or an anti-Axl antibody described in WO2015/193428, WO2015/193430, WO2016/097370, or WO2016/166296.
[2100] 312. A diagnostic kit for use, or test device for use, according to statement 311, wherein the Axl inhibitor is BGB324/R428/bemcentinib.
[2101] 313. A diagnostic kit for use, or test device for use, according to statement 311, wherein the Axl inhibitor is an anti-Axl antibody described in WO2015/193428, WO2015/193430, WO2016/097370, or WO2016/166296.
[2102] 314. A diagnostic kit for use, or test device for use, according to statement 308, wherein the agent capable of inhibiting or reversing EMT or chemotherapeutic agent is an Akt3 inhibitor.
[2103] 315. A diagnostic kit for use, or test device for use, according to any one of statements 307-310, wherein the subject has, is suspected of having, or has been diagnosed with melanoma.
[2104] 316. A diagnostic kit for use, or test device for use, according to any one of statements 307-315, wherein the method is a method according to any one of statements 101-180.
[2105] 317. Use of a reagent for detecting the activity, expression, or amount of a biomarker selected from the group consisting of: Axl, IL-6r, HCC-4, TIMP-1, HB-EGF, ALP, LAP TGF-b1, EGF, PDGF-BB, OPG, NAP-2, ST2, TNF RI, VEGF, GRO-alpha, and/or LDH in a method of predicting a cancer-related outcome in a subject.
[2106] 318. Use of 1, 2, 3, 4, 5, 6, 7, 8, 9, 10 or more reagents for detecting the activity, expression, or amount a biomarker, each of which is selective for a particular biomarker selected from the group consisting of: Axl, IL-6r, HCC-4, TIMP-1, HB-EGF, ALP, LAP TGF-b1, EGF, PDGF-BB, OPG, NAP-2, ST2, TNF RI, VEGF, GRO-alpha, and/or LDH, in a method of manufacture of a diagnostic kit or test device for use in a method of predicting a cancer-related outcome in a subject.
[2107] 319. A use according to statement 317 or 318, wherein the reagent for detecting comprises a specific binding member selective for a particular biomarker.
[2108] 320. A use according to statement 317 or 318, wherein the method of predicting a cancer-related outcome in a subject is a method according to any one of statements 101-180.
[2109] 401. Use of one or more of: Axl, IL-6r, HCC-4, TIMP-1, HB-EGF, ALP, LAP TGF-b1, EGF, PDGF-BB, OPG, NAP-2, ST2, TNF RI, VEGF, GRO-alpha, and/or LDH as a biomarker for determining if a subject is susceptible to treatment with an agent capable of inhibiting or reversing EMT or a chemotherapeutic agent.
[2110] 402. A use according to statement 401, wherein:
   [2111] (i) a higher activity, expression, or amount of one or more of said biomarkers in the subject, or sample derived from the subject, compared with a control profile for the respective biomarker is indicative of susceptibility to treatment with an agent capable of inhibiting or reversing EMT or a chemotherapeutic agent; or
   [2112] (ii) a lower activity, expression, or amount of one or more of said biomarkers in the subject, or sample derived from the subject, compared with a control profile for the respective biomarker is indicative of susceptibility to treatment with an agent capable of inhibiting or reversing EMT or a chemotherapeutic agent.
[2113] 403. A use according to statement 401, wherein:
   [2114] (i) an increase in the activity, expression, or amount of one or more biomarker relative to a control profile for the respective biomarker after contacting the subject with a cancer therapeutic agent is indicative of increased susceptibility to treatment with an agent capable of inhibiting or reversing EMT or a chemotherapeutic agent; or
   [2115] (ii) a decrease in the activity, expression, or amount of one or more biomarker relative to a control profile for the respective biomarker after contacting the subject with a cancer therapeutic agent is indicative of increased susceptibility to treatment with an agent capable of inhibiting or reversing EMT or a chemotherapeutic agent.
[2116] 404. A use according to any one of statements 401-403, wherein the use is as a biomarker in a method according to any one of statements 101-180
[2117] 501. A method of treating a subject having, suspected of having, or diagnosed with melanoma, the method comprising:
   [2118] identifying a subject susceptible to treatment using a method according to any one of statements 101-180; and
   [2119] administering to the subject a therapeutically effective amount of an agent capable of inhibiting or reversing EMT or a chemotherapeutic agent.
[2120] 502. A method of treating a subject having, suspected of having, or diagnosed with melanoma, the method comprising:
   [2121] (a) obtaining a sample from the subject;
   [2122] (b) determining if the subject is susceptible to treatment with an agent capable of inhibiting or reversing EMT or a chemotherapeutic agent using a method according to any one of statements 101-180;
   [2123] (c) administering to the subject a therapeutically effective amount of an agent capable of inhibiting or reversing EMT or a chemotherapeutic agent.
[2124] 503. A method of treating a subject having, suspected of having, or diagnosed with melanoma, the method comprising administering a therapeutically effective amount of an agent capable of inhibiting or reversing EMT or chemotherapeutic agent to a subject identified as susceptible to said treatment using a method according to any one of statements 101-180.
[2125] 504. A method of treating a subject having, suspected of having, or diagnosed with melanoma, the method comprising:
   [2126] administering to the subject a therapeutically effective amount of an agent capable of inhibiting or reversing EMT or a chemotherapeutic agent; and
   [2127] determining if the subject is susceptible to said treatment using a method according to any one of statements 148-180.
[2128] 505. A method according to statement 504, wherein the method comprises administering to the subject one or more further therapeutically effective amounts of an agent capable of inhibiting or reversing EMT or a chemotherapeutic agent provided that the subject is identified as susceptible to said treatment.
[2129] 506. An agent capable of inhibiting or reversing EMT or chemotherapeutic agent for use in a method of treating a subject having, suspected of having, or diagnosed with melanoma,
   [2130] wherein the method is a method according to any one of statements 501-505.
[2131] 507. Use of an agent capable of inhibiting or reversing EMT or chemotherapeutic agent for use in a method of manufacture of a medicament for use in a method of treating a subject having, suspected of having, or diagnosed with melanoma,
   [2132] wherein the method of treatment is a method according to any one of statements 501-505.
[2133] 508. A method, agent for use, or use according to any one of statements 501-507, wherein the agent capable of inhibiting or reversing EMT or chemotherapeutic agent comprises an Axl inhibitor, Akt3 inhibitor, Slfn11 inhibitor, or PHGDH inhibitor.
[2134] 509. A method, agent for use, or use according to statement 508, wherein the agent capable of inhibiting or reversing EMT or chemotherapeutic agent comprises an Axl inhibitor.
[2135] 510. A method, agent for use, or use according to statement 509, wherein the Axl inhibitor is BGB324/R428/bemcentinib, cabozantinib, TP-0903, foretinib, merestinib, bosutinib, gilteritinib, crizotinib, amuvatinib, sunitinib, sitravatinib, LDC1267, UNC2025, or an anti-Axl antibody described in WO2015/193428, WO2015/193430, WO2016/097370, or WO2016/166296.
[2136] 511. A method, agent for use, or use according to statement 510, wherein the Axl inhibitor is BGB324/R428/bemcentinib.
[2137] 512. A method, agent for use, or use according to statement 510, wherein the Axl inhibitor is an anti-Axl antibody described in WO2015/193428, WO2015/193430, WO2016/097370, or WO2016/166296.
[2138] 512. A method, agent for use, or use according to statement 508, wherein the agent capable of inhibiting or reversing EMT or chemotherapeutic agent comprises an Akt3 inhibitor.
[2139] 513. A method, agent for use, or use according to statement 512, wherein the Akt3 inhibitor is an Akt3 inhibitor disclosed in WO2016/102672.
[2140] 514. A method, agent for use, or use according to any one of statements 501-513, wherein the agent capable of inhibiting or reversing EMT or chemotherapeutic agent is administered as a single agent.
[2141] 515. A method, agent for use, or use according to any one of statements 501-513, wherein the agent capable of inhibiting or reversing EMT or chemotherapeutic agent is administered in combination with a further cancer treatment.
[2142] 516. A method, agent for use, or use according to statement 515, wherein the further cancer treatment is selected from the further cancer treatments listed in statement 130.
[2143] 517. A method, agent for use, or use according to statement 515, wherein the further cancer treatment is a monoclonal antibody such as pembrolizumab, alemtuzumab, bevacizumab, cetuximab, ibritumomab tiuxetan, or rituximab, or is a B-Raf inhibitor such as debrafenib, a MEK inhibitor such as trametinib or a combination therapy of these agents.
[2144] 518. A method, agent for use, or use according to statement 517, wherein the further cancer treatment is pembrolizumab.
[2145] 519. A method, agent for use, or use according to statement 517, wherein the further cancer treatment is a combination therapy of debrafenib and trametinib.

[2146] Facet 4a: Melanoma

[2147] Melanoma, also known as malignant melanoma, is a class of cancer that develops from melanocytes. These cancers typically occur in the skin, but can also occur in the mouth, intestines, or eye. Chemotherapeutic drug therapies for melanoma include, for example ipilimumab, pembrolizumab, and nivolumab. The overall success rate of such treatments in metastatic melanoma remains limited, and there remains a need for targeted therapies for this cancer type (Hsueh et al, 2016).

[2148] Accordingly, robust biomarkers for predicting cancer-related outcomes in a subject having melanoma, for example susceptibility to treatment with an agent capable of inhibiting or reversing EMT or a chemotherapeutic agent, would be useful in identifying subjects who are most likely to respond to or benefit from treatment with a particular agent/regimen.

[2149] A “responder” subject as described herein is a subject who is likely to, or who does, respond to treatment (or benefit from treatment) with an agent capable of inhibiting or reversing EMT or a chemotherapeutic agent, for example the small molecule Axl kinase inhibitor BGB324/R428/bemcentinib when administered either as a single agent or in combination with another cancer treatment.

[2150] Correspondingly, a “non-responder” subject as described herein is a subject who is not likely to, or who does not, respond to treatment (or benefit from treatment) with an agent capable of inhibiting or reversing EMT or a chemotherapeutic agent, for example the small molecule Axl kinase inhibitor BGB324/R428/bemcentinib when administered either as a single agent or in combination with another cancer treatment.

[2151] To “respond to treatment” or “benefit from treatment” as used herein means to experience an overall clinical benefit from the treatment. This overall clinical benefit can be any of: prolonged survival, partial or complete disease remission, slowing or absence of disease progression, tumour shrinkage (for example, a reduction in tumour volume of 5, 10, 20, 30, 40% or more), reduction in tumour burden (for example, a reduction in tumour burden of 5, 10, 20, 30, 40% or more), slowing or absence of tumour enlargement, slowing or absence of increase in tumour burden, improved quality of life, progression-free survival, overall survival, or any other positive patient outcome. Suitable methods for determining tumour volume/burden are well known to the skilled person, for example, using: computed tomography (CT), or magnetic resonance imaging (MRI) imaging technologies; X-ray imaging, for example, mammography; ultrasound imaging; nuclear imaging, for example positron emission tomography (PET), PET/CT scans, bone scans, gallium scans, or metaiodobenzylguanidine (MIBG) scans; bioluminescence imaging (BLI); fluorescence imaging (FLI); BD ToF (infrared-based 3D Time-of-Flight camera) imaging.

[2152] Biomarkers

[2153] The term “marker” or “biomarker” is used herein to refer to a gene or protein whose expression in a subject or sample derived from a subject is altered or modulated, for example, up or down regulated, in cancer. Where the biomarker is a protein, modulation or alteration of expression encompasses modulation through different post-translational modifications.

[2154] In accordance with any aspect of this facet of the present disclosure the biomarkers described herein may be defined as follows, wherein:
[2155] an Axl biomarker comprises an amino acid sequence having at least 70%, 80%, 90%, 95%, 99% or 100% sequence identity with the full-length of the amino acid sequence disclosed at UniProt accession no: P30530-1 or P30530-2 (entry version 196) or a fragment thereof;
[2156] a Alpha-Fetoprotein (AFP) biomarker comprises an amino acid sequence having at least 70%, 80%, 90%, 95%, 99% or 100% sequence identity with the full-length of the amino acid sequence disclosed at UniProt accession no: P02771-1 (entry version 192) or a fragment thereof;
[2157] a Heparin-Binding EGF-Like Growth Factor (HB-EGF) biomarker comprises an amino acid sequence having at least 70%, 80%, 90%, 95%, 99% or 100% sequence identity with the full-length of the amino acid sequence disclosed at UniProt accession no: Q99075 (entry version 171) or a fragment thereof;
[2158] a Neuronal Cell Adhesion Molecule (Nr-CAM) biomarker comprises an amino acid sequence having at least 70%, 80%, 90%, 95%, 99% or 100% sequence identity with the full-length of the amino acid sequence disclosed at UniProt accession no: Q92823-1, Q92823-2, Q92823-3, Q92823-4, Q92823-5, or Q92823-6 (entry version 172) or a fragment thereof;
[2159] a Kidney Injury Molecule-1 (KIM-1) biomarker comprises an amino acid sequence having at least 70%, 80%, 90%, 95%, 99% or 100% sequence identity with the full-length of the amino acid sequence disclosed at UniProt accession no: Q96D42-1 (entry version 141) or a fragment thereof;
[2160] a CD 40 antigen (CD40) comprises an amino acid sequence having at least 70%, 80%, 90%, 95%, 99% or 100% sequence identity with the full-length of the amino acid sequence disclosed at UniProt accession no: P25942-1 or P25942-2 (entry version 221) or a fragment thereof;
[2161] a Chromogranin-A (CgA) biomarker comprises an amino acid sequence having at least 70%, 80%, 90%, 95%, 99% or 100% sequence identity with the full-length of the amino acid sequence disclosed at UniProt accession no: P10645-1 (entry version 200) or a fragment thereof;
[2162] a Interleukin-2 receptor alpha (IL-2 receptor alpha) biomarker comprises an amino acid sequence having at least 70%, 80%, 90%, 95%, 99% or 100% sequence identity with the full-length of the amino acid sequence disclosed at UniProt accession no: P01589-1 (entry version 200) or a fragment thereof;
[2163] a Human Chorionic Gonadotropin beta (hCG) comprises an amino acid sequence having at least 70%, 80%, 90%, 95%, 99% or 100% sequence identity with the full-length of the amino acid sequence disclosed at UniProt accession no: PODN86-1 or PODN86-2 (entry version 26) or a fragment thereof;
[2164] a Latency-Associated Peptide of Transforming Growth Factor beta 1 (LAP TGF-b1) biomarker comprises an amino acid sequence having at least 70%, 80%, 90%, 95%, 99% or 100% sequence identity with the full-length of the amino acid sequence disclosed at UniProt accession no: P01137 (entry version 235) or a fragment thereof;
[2165] a Thymus and activation-regulated chemokine (TARC) biomarker comprises an amino acid sequence having at least 70%, 80%, 90%, 95%, 99% or 100% sequence identity with the full-length of the amino acid sequence disclosed at UniProt accession no: Q92583-1 (entry version 163) or a fragment thereof;
[2166] a CD40 Ligand (CD40-L) biomarker comprises an amino acid sequence having at least 70%, 80%, 90%, 95%, 99% or 100% sequence identity with the full-length of the amino acid sequence disclosed at UniProt accession no: P29965 (entry version 199) or a fragment thereof;
[2167] a Epidermal Growth Factor (EGF) biomarker comprises an amino acid sequence having at least 70%, 80%, 90%, 95%, 99% or 100% sequence identity with the full-length of the amino acid sequence disclosed at UniProt accession no: P01133-1, P01133-2, or P01133-3 (entry version 204) or a fragment thereof;
[2168] a Vascular endothelial growth factor receptor 3 (VEGFR-3) biomarker comprises an amino acid sequence having at least 70%, 80%, 90%, 95%, 99% or 100% sequence identity with the full-length of the amino acid sequence disclosed at UniProt accession no: P35916-1, P35916-2, or P35916-3 (entry version 206) or a fragment thereof;
[2169] a Pancreatic secretory trypsin inhibitor (TATI) biomarker comprises an amino acid sequence having at least 70%, 80%, 90%, 95%, 99% or 100% sequence identity with the full-length of the amino acid sequence disclosed at UniProt accession no: P00995-1 (entry version 193) or a fragment thereof;
[2170] a Matrix Metalloproteinase-7 (MMP-7) biomarker comprises an amino acid sequence having at least 70%, 80%, 90%, 95%, 99% or 100% sequence identity with the full-length of the amino acid sequence disclosed at UniProt accession no: P09237-1 (entry version 197) or a fragment thereof;
[2171] a Leptin biomarker comprises an amino acid sequence having at least 70%, 80%, 90%, 95%, 99% or 100% sequence identity with the full-length of the amino acid sequence disclosed at UniProt accession no: P41159 (entry version 176) or a fragment thereof;
[2172] a Apolipoprotein A-I (Apo A-I) biomarker comprises an amino acid sequence having at least 70%, 80%, 90%, 95%, 99% or 100% sequence identity with the full-length of the amino acid sequence disclosed at UniProt accession no: P02647-1 (entry version 241) or a fragment thereof;
[2173] a Periostin biomarker comprises an amino acid sequence having at least 70%, 80%, 90%, 95%, 99% or 100% sequence identity with the full-length of the amino acid sequence disclosed at UniProt accession no: Q15063-1, Q15063-2, Q15063-3, Q15063-4, Q15063-5, Q15063-6, Q15063-7 (entry version 160) or a fragment thereof;
[2174] a Angiopoietin-2 (ANG-2) biomarker comprises an amino acid sequence having at least 70%, 80%, 90%, 95%, 99% or 100% sequence identity with the full-length of the amino acid sequence disclosed at UniProt accession no: 015123-1, 015123-2, or 015123-3 (entry version 163) or a fragment thereof;
[2175] a Cystatin-C biomarker comprises an amino acid sequence having at least 70%, 80%, 90%, 95%, 99% or 100% sequence identity with the full-length of the amino acid sequence disclosed at UniProt accession no: P01034-1 (entry version 213) or a fragment thereof;
[2176] a Hepsin biomarker comprises an amino acid sequence having at least 70%, 80%, 90%, 95%, 99% or 100% sequence identity with the full-length of the amino acid sequence disclosed at UniProt accession no: P05981-1 (entry version 183) or a fragment thereof;
[2177] a Apolipoprotein C-I (Apo C-I) biomarker comprises an amino acid sequence having at least 70%, 80%, 90%, 95%, 99% or 100% sequence identity with the full-length of the amino acid sequence disclosed at UniProt accession no: P02654 (entry version 175) or a fragment thereof;
[2178] a Interleukin-1 receptor type 1 (IL-1RI) biomarker comprises an amino acid sequence having at least 70%, 80%, 90%, 95%, 99% or 100% sequence identity with the full-length of the amino acid sequence disclosed at UniProt accession no: P14778-1 (entry version 215) or a fragment thereof;
[2179] a Eotaxin-2 biomarker comprises an amino acid sequence having at least 70%, 80%, 90%, 95%, 99% or 100% sequence identity with the full-length of the amino acid sequence disclosed at UniProt accession no: 000175-1 (entry version 162) or a fragment thereof;
[2180] a Myeloperoxidase (MPO) biomarker comprises an amino acid sequence having at least 70%, 80%, 90%, 95%, 99% or 100% sequence identity with the full-length of the amino acid sequence disclosed at UniProt accession no: P05164-1, P05164-2, or P05164-3 (entry version 217) or a fragment thereof;
[2181] a Ferritin (FRTN) biomarker comprises an amino acid sequence having at least 70%, 80%, 90%, 95%, 99% or 100% sequence identity with the full-length of the amino acid sequence disclosed at UniProt accession no: P02794 (entry version 213) or a fragment thereof;
[2182] a Lactate Dehydrogenase (LDH) biomarker comprises an amino acid sequence having at least 70%, 80%, 90%, 95%, 99% or 100% sequence identity with the full-length of the amino acid sequence disclosed at UniProt accession no: P00338-1, P00338-2, P00338-3, P00338-4, or P00338-5 (entry version 224) or a fragment thereof; and/or
[2183] a Lactate Dehydrogenase (LDH) biomarker comprises an amino acid sequence having at least 70%, 80%, 90%, 95%, 99% or 100% sequence identity with the full-length of the amino acid sequence disclosed at UniProt accession no: P07195-1 (entry version 218) or a fragment thereof.

[2184] The biomarkers described herein may also be defined as a nucleic acid (either DNA or RNA) having at least 70%, 80%, 90%, 95%, 99% or 100% sequence identity with the full-length nucleic acid sequence encoding any of the above amino acid sequences.

[2185] Identity may be as defined using sequence comparisons made using FASTA and FASTP (see Pearson & Lipman, 1988. Methods in Enzymology 183: 63-98). Parameters are preferably set, using the default matrix, as follows: Gapopen (penalty for the first residue in a gap): −12 for proteins/-16 for DNA; Gapext (penalty for additional residues in a gap): −2 for proteins/-4 for DNA; KTUP word length: 2 for proteins/6 for DNA.

[2186] Pre-Treatment Predictive Biomarkers and Methods

[2187] By analysing patient data obtained from clinical trial BGBIL006 (NCT02872259), the authors have discovered that, prior to treatment of subjects having melanoma, certain of the biomarkers described herein are present in the serum of “responder” subjects at higher levels than in the serum of “non-responder” subjects—see Example 2 and Example 7. Similarly, prior to treatment of the subject certain of the biomarkers described herein are present in the serum of “responder” subjects at lower levels than in the serum of “non-responder” subjects. Thus, by assessing the activity, expression, or amount of one or more of the biomarkers described herein prior to treatment with an agent capable of inhibiting or reversing EMT or a chemotherapeutic agent it is possible to determine the likelihood of that subject being susceptible or responsive to treatment with said agent.

[2188] Accordingly, in a first aspect of this facet, the disclosure provides a method of predicting a cancer-related outcome in a subject having, suspected of having, or diagnosed with melanoma, the method comprising assessing the activity, expression, or amount of one or more of the biomarkers described herein in the subject, or in a sample derived from the subject.

[2189] In some embodiments the one or more biomarker is selected from the group consisting of: HB-EGF, AFP, CgA, Nr-CAM, KIM-1, CD40, LAP TGF-b1, EGF, IL-2 receptor alpha, hCG, TARO, CD40-L, VEGFR-3, TATI, MMP-7, Leptin, Apo A-I, Periostin, ANG-2, Cystatin-C, Hepsin Apo C-I, IL-1RI, Eotaxin-2, MPO, FRTN, Axl, and/or LDH.

[2190] A “cancer-related outcome” as described herein is a clinical prediction or prognosis associated with cancer. In some embodiments the cancer-related outcome is susceptibility to treatment with an agent capable of inhibiting or reversing EMT or a chemotherapeutic agent.

[2191] In some embodiments the method comprises assessing the activity, expression, or amount of one or more of the biomarkers described herein in the subject, or in a sample derived from the subject, to obtain a sample profile of the one or more biomarker; and, making a prediction based on the sample profile of the one or more biomarker.

[2192] A “sample profile” as used herein is a profile of numerical values or numerical ranges corresponding to the activity, expression, or amount of respective biomarkers determined in the subject or sample derived from the subject.

[2193] In some embodiments of the method the prediction is made by comparing the sample profile to a control profile. A “control profile” as used herein is a profile of numerical values or numerical ranges corresponding to the activity, expression, or amount of the same biomarkers as for the sample profile, determined in a control subject or population of control subjects. Suitable control profiles are described in more detail below.

[2194] Prior to treatment of a subject, certain of the biomarkers described herein have been found to exhibit up-regulated expression in “responder” subjects—that is, certain of the biomarkers described herein have been found to be present in the serum of “responder” subjects at higher levels than in the serum of “non-responder” subjects. Similarly, prior to treatment of a subject, certain of the biomarkers described herein have been found to exhibit down-regulated expression in “responder” subjects—that is, certain of the biomarkers described herein have been found to be present in the serum of “responder” subjects at lower levels than in the serum of “non-responder” subjects.

[2195] This difference in expression level between “responder” and “non-responder” subjects can also be expressed in the opposite way. That is to say, prior to treatment of a subject, certain of the biomarkers described herein have been found to exhibit down-regulated expression in “non-responder” subjects—that is, certain of the biomarkers described herein have been found to be present in the serum of “non-responder” subjects at lower levels than in the serum of “responder” subjects. Similarly, prior to treatment of a subject, certain of the biomarkers described herein have been found to exhibit up-regulated expression in “non-responder” subjects—that is, certain of the biomarkers described herein have been found to be present in the serum of “non-responder” subjects at higher levels than in the serum of “responder” subjects.

[2196] The discovery of these differential patterns of expression mean that, by assessing the activity, expression, or amount of one or more of the biomarkers described herein prior to treatment of a subject with an agent, it is possible to determine the likelihood of that subject being susceptible or responsive to treatment with said agent. Accordingly, in particularly preferred embodiments the sample profile is obtained before the subject is contacted with or administered the agent capable of inhibiting or reversing EMT or a chemotherapeutic agent.

[2197] A subject who is “susceptible to treatment” with an agent capable of inhibiting or reversing EMT or a chemotherapeutic agent is one who is likely to, or who does, respond to treatment (or benefit from treatment) with an agent capable of inhibiting or reversing EMT or a chemotherapeutic agent. That is, a subject who is “susceptible to treatment” with an agent is a “responder” subject for that agent, as defined above. A prediction that is “indicative of susceptibility” is one which suggests or points towards the likelihood that a subject will respond to or benefit from treatment.

[2198] In some embodiments the predictive methods of the disclosure comprise assessing the activity, expression, or amount of one or more of the biomarkers described herein in the subject, or in a sample derived from the subject, to obtain a sample profile of the one or more biomarker; and, making a prediction based on the sample profile of the one or more biomarker. In some embodiments of the method the prediction is made by comparing the sample profile to a control profile, wherein the control profile is a profile of numerical values or numerical ranges corresponding to the activity, expression, or amount of the same biomarkers as for the sample profile, determined in a control subject or population of control subjects.

[2199] In some embodiments the control profile may be obtained from a population of control subjects having melanoma. In some embodiments the control profile may be obtained from a population of control subjects not having melanoma. In other embodiments the control profile may be obtained from a control subject or population of control subjects having melanoma and previously found to lack susceptibility to treatment with an agent capable of inhibiting or reversing EMT or a chemotherapeutic agent (that is, non-responder subjects).

[2200] In some embodiments the control profile may a predetermined profile of biomarker expression, activity, or amount values, for example a profile of “mean” values, “threshold” values, or “standard ranges” of values. This predetermined profile of biomarker expression, activity, or amount values can be obtained, for example, from a control subject or population of control subjects having melanoma, a control subject or population of control subjects not having melanoma, or a control subject or population of control subjects having melanoma and previously found to lack susceptibility to treatment with an agent capable of inhibiting or reversing EMT or a chemotherapeutic agent (that is, non-responder subjects).

[2201] In some other embodiments the control profile may be obtained from a control subject or population of control subjects having melanoma and previously found to be susceptible to treatment with an agent capable of inhibiting or reversing EMT or a chemotherapeutic agent (that is, responder subjects). In some embodiments the control profile may a predetermined profile of biomarker expression, activity, or amount values, for example a profile of “threshold”, values or “standard ranges” of values. This predetermined profile of biomarker expression, activity, or amount values can be obtained, for example, from a control subject or population of control subjects having melanoma and previously found to be susceptible to treatment with an agent capable of inhibiting or reversing EMT or a chemotherapeutic agent (that is, responder subjects).

[2202] In some other embodiments the control profile may be obtained from a control sample having a known amount (for example a “threshold” amount) of the same biomarkers as will be determined in the sample profile. This threshold amount can be obtained, for example, from non-responder or responder subjects as outlined above.

[2203] The skilled person is readily able to determine suitable “mean”, “threshold”, or “standard range” values for a particular biomarker.

[2204] For example, a “mean” value may be determined by: assessing the activity, expression, or amount of a particular biomarker in a population of subjects having (or not having) melanoma; and, averaging the biomarker activity, expression, or amount determined to determine a “mean” value.

[2205] For example, a “mean” value may be determined by: assessing the activity, expression, or amount of a particular biomarker in a population of subjects; determining which subjects in the population are susceptible to treatment with an agent capable of inhibiting or reversing EMT or a chemotherapeutic agent; and, averaging the biomarker activity, expression, or amount determined in subjects found to be susceptible to treatment with an agent capable of inhibiting or reversing EMT or a chemotherapeutic agent (that is, responder subjects) to determine a “mean” value.

[2206] For example, a “threshold” value may be determined by: assessing the activity, expression, or amount of a particular biomarker in a population of subjects; determining which subjects in the population are susceptible to treatment with an agent capable of inhibiting or reversing EMT or a chemotherapeutic agent; and, selecting as appropriate the highest or lowest biomarker activity, expression, or amount determined in a subject found to be susceptible to treatment with an agent capable of inhibiting or reversing EMT or a chemotherapeutic agent (that is, a responder subject) as the “threshold value”.

[2207] For example, a “standard range” of values may be determined by: assessing the activity, expression, or amount of a particular biomarker in a population of subjects having (or not having) melanoma; and, determining a “standard range” of values based on this assessment.

[2208] For example, a “standard range” of values may be determined by: assessing the activity, expression, or amount of a particular biomarker in a population of subjects; determining which subjects in the population are susceptible to treatment with an agent capable of inhibiting or reversing EMT or a chemotherapeutic agent; and, determining a “standard range” of values for subjects found to be susceptible to treatment with an agent capable of inhibiting or reversing EMT or a chemotherapeutic agent (that is, a responder subject) based on this assessment.

[2209] Where the control profile is a predetermined profile of biomarker expression, activity, or amount values, this may be provided as a “look-up table” or data record. Predetermined control profiles of this type may be a profile of numerical values or numerical ranges corresponding to a measure of central tendency (such as an average, median or mean) amount of the respective biomarkers determined in a plurality of control subjects (for example non-responder or responder subjects as outlined above). The skilled person is readily able to determine both a measure of central tendency and a measure of variability within a population using standard protein quantification techniques and suitable statistical tools.

[2210] Accordingly, in embodiments in which the control profile is: obtained from a population of control subjects having melanoma; obtained from a population of control subjects not having melanoma; obtained from a control subject or population of control subjects having melanoma and previously found to lack susceptibility to treatment with an agent capable of inhibiting or reversing EMT or a chemotherapeutic agent (that is non-responder subjects); a predetermined profile of biomarker expression, activity, or amount values (for example a profile of “average, median, or mean” values or “standard ranges” of values) obtained from non-responder subjects; obtained from a control sample having a known “average, median, or mean” value of biomarkers indicative of non-responder subjects; a predetermined profile of biomarker expression, activity, or amount “threshold” values obtained from responder subjects; or, obtained from a control sample having a known “threshold” value of biomarkers indicative of responder subjects; then, a higher activity, expression, or amount of one or more of the biomarkers described herein in a sample profile as compared with the control profile may be indicative of susceptibility to treatment with an agent capable of inhibiting or reversing EMT or a chemotherapeutic agent. Similarly, a lower activity, expression, or amount of one or more of the biomarkers described herein in the sample profile as compared with a control profile may be indicative of susceptibility to treatment with an agent capable of inhibiting or reversing EMT or a chemotherapeutic agent.

[2211] In some such embodiments, the method may comprise assessing the activity, expression, or amount of one or more of biomarker selected from: HB-EGF, CgA, Nr-CAM, KIM-1, CD40, LAP TGF-b1, EGF, IL-2 receptor alpha, TARC, CD40-L, VEGFR-3, TATI, MMP-7, Leptin, Apo A-I, ANG-2, Cystatin-C, Hepsin Apo C-I, IL-1RI, Axl, and/or LDH; wherein a higher activity, expression, or amount of one or more of said biomarkers in the sample profile as compared with the control profile is indicative of susceptibility to treatment with an agent capable of inhibiting or reversing EMT or a chemotherapeutic agent.

[2212] In some such embodiments, the method may comprise assessing the activity, expression, or amount of one or more of biomarker selected from: AFP, Periostin, hCG, Eotaxin-2, MPO, and/or FRTN; wherein a lower activity, expression, or amount of one or more of said biomarkers in the sample profile as compared with the control profile is indicative of susceptibility to treatment with an agent capable of inhibiting or reversing EMT or a chemotherapeutic agent.

[2213] In some such embodiments: a lower activity, expression, or amount of AFP; and/or a lower activity, expression, or amount of Periostin; and/or a lower activity, expression, or amount of hCG; and/or a lower activity, expression, or amount of Eotaxin-2; and/or a lower activity, expression, or amount of MPO; and/or a lower activity, expression, or amount of FRTN; and/or a higher activity, expression, or amount of TIMP-1; and/or a higher activity, expression, or amount of HB-EGF; and/or a higher activity, expression, or amount of HB-EGF; and/or a higher activity, expression, or amount of CgA; and/or a higher activity, expression, or amount of Nr-CAM; and/or a higher activity, expression, or amount of KIM-1; and/or a higher activity, expression, or amount of CD40; and/or a higher activity, expression, or amount of LAP TGF-b1; and/or a higher activity, expression, or amount of EGF; and/or a higher activity, expression, or amount of IL-2ra; and/or a higher activity, expression, or amount of TARO; and/or a higher activity, expression, or amount of CD40-L; and/or a higher activity, expression, or amount of VEGFR-3; and/or a higher activity, expression, or amount of TATI; and/or a higher activity, expression, or amount of MMP-7; and/or a higher activity, expression, or amount of Leptin; and/or a higher activity, expression, or amount of Apo A-I; and/or a higher activity, expression, or amount of ANG-2; and/or a higher activity, expression, or amount of Cystatin-C; and/or a higher activity, expression, or amount of Hepsin; and/or a higher activity, expression, or amount of Apo C-I; and/or a higher activity, expression, or amount of IL-1RI; and/or a higher activity, expression, or amount of Axl; and/or a higher activity, expression, or amount of LDH in the sample profile as compared with the control profile is indicative of susceptibility to treatment with an agent capable of inhibiting or reversing EMT or a chemotherapeutic agent.

[2214] In embodiments in which the control profile is: obtained from a control subject or population of control subjects having melanoma and previously found to be susceptible to treatment with an agent capable of inhibiting or reversing EMT or a chemotherapeutic agent (that is, responder subjects); then, if the expression, activity, or amount values in the sample profile are above a “threshold” value typical of a responder subject (that is, a subject having melanoma and previously found to be susceptible to treatment with an agent capable of inhibiting or reversing EMT or a chemotherapeutic agent) this is indicative of susceptibility to treatment with an agent capable of inhibiting or reversing EMT or a chemotherapeutic agent. Similarly, if the expression, activity, or amount values in the sample profile are below the “threshold” value typical of a responder subject (that is, a subject having melanoma and previously found to be susceptible to treatment with an agent capable of inhibiting or reversing EMT or a chemotherapeutic agent) this is indicative of a lack of susceptibility to treatment with an agent capable of inhibiting or reversing EMT or a chemotherapeutic agent.

[2215] In embodiments in which the control profile is: a predetermined profile of “standard ranges” of biomarker expression, activity, or amount values obtained from responder subjects; then, if the expression, activity, or amount values in the sample profile are within the “standard range” of values typical of a responder subject (that is, a subject having melanoma and previously found to be susceptible to treatment with an agent capable of inhibiting or reversing EMT or a chemotherapeutic agent) this is indicative of susceptibility to treatment with an agent capable of inhibiting or reversing EMT or a chemotherapeutic agent. Similarly, if the expression, activity, or amount values in the sample profile are outside the “standard range” of values typical of a responder subject (that is, a subject having melanoma and previously found to be susceptible to treatment with an agent capable of inhibiting or reversing EMT or a chemotherapeutic agent) this is indicative of a lack of susceptibility to treatment with an agent capable of inhibiting or reversing EMT or a chemotherapeutic agent.

[2216] In embodiments in which the control profile is: a predetermined profile of “standard ranges” of biomarker expression, activity, or amount values obtained from non-responder subjects; then, if the expression, activity, or amount values in the sample profile are within the “standard range” of values typical of a non-responder subject (that is, a subject having melanoma and previously found to lack susceptibility to treatment with an agent capable of inhibiting or reversing EMT or a chemotherapeutic agent) this is indicative of a lack of susceptibility to treatment with an agent capable of inhibiting or reversing EMT or a chemotherapeutic agent. Similarly, if the expression, activity, or amount values in the sample profile are outside the “standard range” of values typical of a non-responder subject (that is, a subject having melanoma and previously found to lack susceptibility to treatment with an agent capable of inhibiting or reversing EMT or a chemotherapeutic agent) this may be indicative of susceptibility to treatment with an agent capable of inhibiting or reversing EMT or a chemotherapeutic agent.

[2217] In embodiments in which the control profile is: obtained from a population of control subjects not having melanoma; then, if the expression, activity, or amount values in the sample profile are outside a “standard range” of values typical of subjects not having melanoma, this is indicative of susceptibility to treatment with an agent capable of inhibiting or reversing EMT or a chemotherapeutic agent. Similarly, if the expression, activity, or amount values in the sample profile are within a “standard range” of values typical of subjects not having melanoma, this is indicative of a lack of susceptibility to treatment with an agent capable of inhibiting or reversing EMT or a chemotherapeutic agent. In such cases, an expression, activity or amount value may be outside the “standard range” of values when it is either above the upper limit of normal or below the lower limit of normal for a given biomarker. The upper limit of normal and lower limit of normal are the limits of the normal distribution of a given biomarker in a population of control subjects not having melanoma.

[2218] In embodiments in which the one or more biomarker comprises LDH, an expression or amount of LDH higher than 287 units per litre (U/L) may be indicative of susceptibility to treatment with an agent capable of inhibiting or reversing EMT or a chemotherapeutic agent.

[2219] The skilled person is readily able to determine whether the sample profile is indicative of susceptibility or lack of susceptibility to treatment with an agent capable of inhibiting or reversing EMT or a chemotherapeutic agent using suitable statistical tools and comparison with the appropriate control.

[2220] In some embodiments the sample profile may be compared with two or more control profiles as described above.

[2221] As used herein, the term “one or more” means 1, 2, 3, 4, 5, 6, 7, 8, 9, 10, 11, 12, 13, 14, 15, 16, 17, 18, 19, or 20 of the biomarkers described herein. In some embodiments the one or more biomarker is HB-EGF. In some embodiments the one or more biomarker is AFP. In some embodiments the one or more biomarker is Axl. In some embodiments the one or more biomarker is CgA. In some embodiments the one or more biomarker is Nr-CAM. In some embodiments the one or more biomarker is KIM-1. In some embodiments the one or more biomarker is CD40. In some embodiments the one or more biomarker is LAP TGF-b1. In some embodiments the one or more biomarker is EGF. In some embodiments the one or more biomarker is IL-2 receptor alpha. In some embodiments the one or more biomarker is hCG. In some embodiments the one or more biomarker is TARO. In some embodiments the one or more biomarker is CD40-L. In some embodiments the one or more biomarker is VEGFR-3. In some embodiments the one or more biomarker is TATI. In some embodiments the one or more biomarker is MMP-7. In some embodiments the one or more biomarker is Leptin. In some embodiments the one or more biomarker is Apo A-I. In some embodiments the one or more biomarker is Periostin. In some embodiments the one or more biomarker is ANG-2. In some embodiments the one or more biomarker is Cystatin-C. In some embodiments the one or more biomarker is Hepsin. In some embodiments the one or more biomarker is Apo C-I. In some embodiments the one or more biomarker is IL-1RI. In some embodiments the one or more biomarker is Eotaxin-21n some embodiments the one or more biomarker is MPO. In some embodiments the one or more biomarker is FRTN. In some embodiments the one or more biomarker is LDH.

[2222] In some preferred embodiments the one or more biomarker is HB-EGF. In some preferred embodiments the one or more biomarker is Axl. In some preferred embodiments the one or more biomarker is AFP. In some preferred embodiments the one or more biomarker is CgA. In some preferred embodiments the one or more biomarker is Nr-CAM. In some preferred embodiments the one or more biomarker is KIM-1. In some preferred embodiments the one or more biomarker is CD40. In some preferred embodiments the one or more biomarker is LAP TGF-b1. In some preferred embodiments the one or more biomarker is EGF. In some preferred embodiments the one or more biomarker is TATI.

[2223] In some embodiments the one or more biomarker is HB-EGF and AFP. In some embodiments the one or more biomarker is HB-EGF and CgA. In some embodiments the one or more biomarker is HB-EGF and Nr-CAM. In some embodiments the one or more biomarker is HB-EGF and TATI. In some embodiments the one or more biomarker is HB-EGF and KIM-1. In some embodiments the one or more biomarker is HB-EGF and CD40. In some embodiments the one or more biomarker is HB-EGF and LAP TGF-b1. In some embodiments the one or more biomarker is HB-EGF and EGF. In some embodiments the one or more biomarker is HB-EGF and Axl.

[2224] In some embodiments the one or more biomarker is AFP and CgA. In some embodiments the one or more biomarker is AFP and Nr-CAM. In some embodiments the one or more biomarker is AFP and TATI. In some embodiments the one or more biomarker is AFP and KIM-1. In some embodiments the one or more biomarker is AFP and CD40. In some embodiments the one or more biomarker is AFP and LAP TGF-b1. In some embodiments the one or more biomarker is AFP and EGF. In some embodiments the one or more biomarker is AFP and Axl.

[2225] In some embodiments the one or more biomarker is CgA and Nr-CAM. In some embodiments the one or more biomarker is CgA and TATI. In some embodiments the one or more biomarker is CgA and KIM-1. In some embodiments the one or more biomarker is CgA and CD40. In some embodiments the one or more biomarker is CgA and LAP TGF-b1. In some embodiments the one or more biomarker is CgA and EGF. In some embodiments the one or more biomarker is CgA and Axl.

[2226] In some embodiments the one or more biomarker is Nr-CAM and TATI. In some embodiments the one or more biomarker is Nr-CAM and KIM-1. In some embodiments the one or more biomarker is Nr-CAM and CD40. In some embodiments the one or more biomarker is Nr-CAM and LAP TGF-b1. In some embodiments the one or more biomarker is Nr-CAM and EGF. In some embodiments the one or more biomarker is Nr-CAM and Axl.

[2227] In some embodiments the one or more biomarker is TATI and KIM-1. In some embodiments the one or more biomarker is TATI and CD40. In some embodiments the one or more biomarker is TATI and LAP TGF-b1. In some embodiments the one or more biomarker is TATI and EGF. In some embodiments the one or more biomarker is TATI and Axl.

[2228] In some embodiments the one or more biomarker is KIM-1 and CD40. In some embodiments the one or more biomarker is KIM-1 and LAP TGF-b1. In some embodiments the one or more biomarker is KIM-1 and EGF. In some embodiments the one or more biomarker is KIM-1 and Axl.

[2229] In some embodiments the one or more biomarker is CD40 and LAP TGF-b1. In some embodiments the one or more biomarker is CD40 and EGF. In some embodiments the one or more biomarker is CD40 and Axl.

[2230] In some embodiments the one or more biomarker is EGF and LAP TGF-b1. In some embodiments the one or more biomarker is EGF and Axl.

[2231] In some embodiments the one or more biomarker is Axl and LAP TGF-b1

[2232] In some embodiments the one or more biomarker is CgA, HB-EGF and AFP. In some embodiments the one or more biomarker is CgA, HB-EGF and Nr-CAM. In some embodiments the one or more biomarker is CgA, HB-EGF and TATI. In some embodiments the one or more biomarker is CgA, HB-EGF and KIM-1. In some embodiments the one or more biomarker is CgA, HB-EGF and CD40. In some embodiments the one or more biomarker is CgA, HB-EGF and LAP TGF-b1. In some embodiments the one or more biomarker is CgA, HB-EGF and EGF. In some embodiments the one or more biomarker is CgA, HB-EGF and Axl.

[2233] In some embodiments the one or more biomarker is CgA, AFP and Nr-CAM. In some embodiments the one or more biomarker is CgA, AFP and TATI. In some embodiments the one or more biomarker is CgA, AFP and KIM-1. In some embodiments the one or more biomarker is CgA, AFP and CD40. In some embodiments the one or more biomarker is CgA, AFP and LAP TGF-b1. In some embodiments the one or more biomarker is CgA, AFP and EGF. In some embodiments the one or more biomarker is CgA, AFP and Axl.

[2234] In some embodiments the one or more biomarker is CgA, Nr-CAM and TATI. In some embodiments the one or more biomarker is CgA, Nr-CAM and KIM-1. In some embodiments the one or more biomarker is CgA, Nr-CAM and CD40. In some embodiments the one or more biomarker is CgA, Nr-CAM and LAP TGF-b1. In some embodiments the one or more biomarker is CgA, Nr-CAM and EGF. In some embodiments the one or more biomarker is CgA, Nr-CAM and Axl.

[2235] In some embodiments the one or more biomarker is CgA, TATI and KIM-1. In some embodiments the one or more biomarker is CgA, TATI and CD40. In some embodiments the one or more biomarker is CgA, TATI and LAP TGF-b1. In some embodiments the one or more biomarker is CgA, TATI and EGF. In some embodiments the one or more biomarker is CgA, TATI and Axl.

[2236] In some embodiments the one or more biomarker is CgA, KIM-1 and CD40. In some embodiments the one or more biomarker is CgA, KIM-1 and LAP TGF-b1. In some embodiments the one or more biomarker is CgA, KIM-1 and EGF. In some embodiments the one or more biomarker is CgA, KIM-1 and Axl.

[2237] In some embodiments the one or more biomarker is CgA, CD40 and LAP TGF-b1. In some embodiments the one or more biomarker is CgA, CD40 and EGF. In some embodiments the one or more biomarker is CgA, CD40 and Axl.

[2238] In some embodiments the one or more biomarker is CgA, EGF and LAP TGF-b1. In some embodiments the one or more biomarker is CgA, EGF and Axl.

[2239] In some embodiments the one or more biomarker is CgA, Axl, and LAP TGF-b1

[2240] In some embodiments the one or more biomarker is HB-EGF and AFP. In some embodiments the one or more biomarker is HB-EGF and CgA. In some embodiments the one or more biomarker is HB-EGF and Nr-CAM. In some embodiments the one or more biomarker is HB-EGF and TATI. In some embodiments the one or more biomarker is HB-EGF and KIM-1. In some embodiments the one or more biomarker is HB-EGF and CD40. In some embodiments the one or more biomarker is HB-EGF and LAP TGF-b1. In some embodiments the one or more biomarker is HB-EGF and EGF. In some embodiments the one or more biomarker is HB-EGF and Axl.

[2241] In some embodiments the one or more biomarker is AFP, Nr-CAM and TATI. In some embodiments the one or more biomarker is AFP, Nr-CAM and KIM-1. In some embodiments the one or more biomarker is Nr-CAM and CD40. In some embodiments the one or more biomarker is AFP, Nr-CAM and LAP TGF-b1. In some embodiments the one or more biomarker is AFP, Nr-CAM and EGF. In some embodiments the one or more biomarker is AFP, Nr-CAM and Axl.

[2242] In some embodiments the one or more biomarker is AFP, TATI and KIM-1. In some embodiments the one or more biomarker is AFP, TATI and CD40. In some embodiments the one or more biomarker is AFP, TATI and LAP TGF-b1. In some embodiments the one or more biomarker is AFP, TATI and EGF. In some embodiments the one or more biomarker is AFP, TATI and Axl.

[2243] In some embodiments the one or more biomarker is AFP, KIM-1 and CD40. In some embodiments the one or more biomarker is AFP, KIM-1 and LAP TGF-b1. In some embodiments the one or more biomarker is AFP, KIM-1 and EGF. In some embodiments the one or more biomarker is AFP, KIM-1 and Axl.

[2244] In some embodiments the one or more biomarker is AFP, CD40 and LAP TGF-b1. In some embodiments the one or more biomarker is AFP, CD40 and EGF. In some embodiments the one or more biomarker is AFP, CD40 and Axl.

[2245] In some embodiments the one or more biomarker is AFP, EGF and LAP TGF-b1. In some embodiments the one or more biomarker is AFP, EGF and Axl.

[2246] In some embodiments the one or more biomarker is AFP, Axl and LAP TGF-b1

[2247] In some embodiments the one or more biomarker is HB-EGF, Nr-CAM and TATI. In some embodiments the one or more biomarker is HB-EGF, Nr-CAM and KIM-1. In some embodiments the one or more biomarker is HB-EGF, Nr-CAM and CD40. In some embodiments the one or more biomarker is HB-EGF, Nr-CAM and LAP TGF-b1. In some embodiments the one or more biomarker is HB-EGF, Nr-CAM and EGF. In some embodiments the one or more biomarker is HB-EGF, Nr-CAM and Axl.

[2248] In some embodiments the one or more biomarker is HB-EGF, TATI and KIM-1. In some embodiments the one or more biomarker is HB-EGF, TATI and CD40. In some embodiments the one or more biomarker is HB-EGF, TATI and LAP TGF-b1. In some embodiments the one or more biomarker is HB-EGF, TATI and EGF. In some embodiments the one or more biomarker is HB-EGF, TATI and Axl.

[2249] In some embodiments the one or more biomarker is HB-EGF, KIM-1 and CD40. In some embodiments the one or more biomarker is HB-EGF, KIM-1 and LAP TGF-b1. In some embodiments the one or more biomarker is HB-EGF, KIM-1 and EGF. In some embodiments the one or more biomarker is HB-EGF, KIM-1 and Axl.

[2250] In some embodiments the one or more biomarker is HB-EGF, CD40 and LAP TGF-b1. In some embodiments the one or more biomarker is HB-EGF, CD40 and EGF. In some embodiments the one or more biomarker is HB-EGF, CD40 and Axl.

[2251] In some embodiments the one or more biomarker is HB-EGF, EGF and LAP TGF-b1. In some embodiments the one or more biomarker is HB-EGF, EGF and Axl.

[2252] In some embodiments the one or more biomarker is HB-EGF, Axl and LAP TGF-b1

[2253] In some embodiments the one or more biomarker is Nr-CAM, TATI and KIM-1. In some embodiments the one or more biomarker is Nr-CAM, TATI and CD40. In some embodiments the one or more biomarker is Nr-CAM, TATI and LAP TGF-b1. In some embodiments the one or more biomarker is Nr-CAM, TATI and EGF. In some embodiments the one or more biomarker is Nr-CAM, TATI and Axl.

[2254] In some embodiments the one or more biomarker is Nr-CAM, KIM-1 and CD40. In some embodiments the one or more biomarker is Nr-CAM, KIM-1 and LAP TGF-b1. In some embodiments the one or more biomarker is Nr-CAM, Nr-CAM, KIM-1 and EGF. In some embodiments the one or more biomarker is Nr-CAM, KIM-1 and Axl.

[2255] In some embodiments the one or more biomarker is Nr-CAM, CD40 and LAP TGF-b1. In some embodiments the one or more biomarker is Nr-CAM, CD40 and EGF. In some embodiments the one or more biomarker is Nr-CAM, CD40 and Axl.

[2256] In some embodiments the one or more biomarker is Nr-CAM, EGF and LAP TGF-b1. In some embodiments the one or more biomarker is Nr-CAM, EGF and Axl.

[2257] In some embodiments the one or more biomarker is Nr-CAM, Axl and LAP TGF-b1

[2258] In some embodiments the one or more biomarker is TATI, KIM-1 and CD40. In some embodiments the one or more biomarker is TATI, KIM-1 and LAP TGF-b1. In some embodiments the one or more biomarker is TATI, KIM-1 and EGF. In some embodiments the one or more biomarker is TATI, KIM-1 and Axl.

[2259] In some embodiments the one or more biomarker is TATI, CD40 and LAP TGF-b1. In some embodiments the one or more biomarker is TATI, CD40 and EGF. In some embodiments the one or more biomarker is TATI, CD40 and Axl.

[2260] In some embodiments the one or more biomarker is TATI, EGF and LAP TGF-b1. In some embodiments the one or more biomarker is TATI, EGF and Axl.

[2261] In some embodiments the one or more biomarker is TATI, Axl and LAP TGF-b1

[2262] In some embodiments the one or more biomarker is KIM-1, CD40 and LAP TGF-b1. In some embodiments the one or more biomarker is KIM-1, CD40 and EGF. In some embodiments the one or more biomarker is KIM-1, CD40 and Axl.

[2263] In some embodiments the one or more biomarker is KIM-1, EGF and LAP TGF-b1. In some embodiments the one or more biomarker is KIM-1, EGF and Axl.

[2264] In some embodiments the one or more biomarker is KIM-1, Axl and LAP TGF-b1

[2265] In some embodiments the one or more biomarker is CD40, EGF and LAP TGF-b1. In some embodiments the one or more biomarker is CD40, EGF and Axl.

[2266] In some embodiments the one or more biomarker is CD40, Axl and LAP TGF-b1

[2267] In some embodiments the one or more biomarker is EGF, Axl and LAP TGF-b1

[2268] In some embodiments the method may comprise assessing the activity, expression, or amount of at least 2, 3, 4, 5, 6, 7, 8, 9, 10, 11, 12, 13, 14, 15, 20 of said biomarkers in the subject, or in a sample derived from the subject. In some embodiments the method may comprise assessing the activity, expression, or amount of Axl and at least 1, 2, 3, 4, 5, 6, 7, 8, 9, 10, 11, 12, 13, 14, 15, 20 further biomarkers described herein in the subject, or in a sample derived from the subject. In some embodiments the method may comprise assessing the activity, expression, or amount of LDH and at least 1, 2, 3, 4, 5, 6, 7, 8, 9, 10, 11, 12, 13, 14, 15, 20 further biomarkers described herein in the subject, or in a sample derived from the subject. In some embodiments the method may comprise assessing the activity, expression, or amount of Axl, LDH, and at least 1, 2, 3, 4, 5, 6, 7, 8, 9, 10, 11, 12, 13, 14, 15, 20 further biomarkers described herein in the subject, or in a sample derived from the subject.

[2269] Subject

[2270] A “subject” as referred to herein is any species of animal classified as a mammal, and includes but is not restricted to, domestic and farm animals, primates and humans. In some preferred embodiments the subject is a human of any sex or race. In some embodiments, the human is an adult human.

[2271] In some embodiments the predictive methods described herein are performed before the subject receives a treatment or course of treatment for melanoma. In other embodiments the predictive method is performed during or after a treatment or course of treatment for melanoma. In some embodiments the treatment or course of treatment for melanoma is an agent capable of inhibiting or reversing EMT. In other embodiments the treatment or course of treatment for melanoma is a chemotherapeutic treatment that is not an agent capable of inhibiting or reversing EMT.

[2272] In some embodiments of the predictive methods described herein the subject has previously been treated with an agent capable of inhibiting or reversing EMT or a chemotherapeutic agent. In some embodiments the subject has previously been treated with an agent selected from: a PHGDH inhibitor, a Slfn11 inhibitor, an Axl inhibitor, or an Akt3 inhibitor.

[2273] In some embodiments of the predictive methods described herein the subject has previously been treated with an agent that is different to the agent capable of inhibiting or reversing EMT or chemotherapeutic agent for which the subject's response is being predicted. That is, the subject has previously been treated with an agent that is not the agent which the predictive method is determining the subject's susceptibility to. Accordingly, in some embodiments, the subject has not previously been treated with an agent capable of inhibiting or reversing EMT or a chemotherapeutic agent. In some preferred embodiments, the subject has not previously been treated with an Axl inhibitor. In other preferred embodiments, the subject has not previously been treated with an Akt3 inhibitor.

[2274] Post-Treatment Changes in Biomarkers

[2275] In some embodiments of this aspect of the disclosure, the predictive method further comprises a subsequent step of assessing the activity, expression, or amount of one or more biomarker in the subject, or in a sample derived from the subject, to obtain a second sample profile of one or more of the biomarkers described herein after the subject has received a treatment or course of treatment an agent capable of inhibiting or reversing EMT or a chemotherapeutic agent.

[2276] That is, in some embodiments, the predictive method comprises:
[2277] (a) determining if a subject is susceptible to treatment with an agent capable of inhibiting or reversing EMT or a chemotherapeutic agent by assessing the activity, expression, or amount of one or more biomarker in the subject, as outlined above;
[2278] (b) administering to the subject a therapeutically effective amount of an agent capable of inhibiting or reversing EMT or a chemotherapeutic agent; and
[2279] (c) subsequently assessing the activity, expression, or amount of one or more biomarker in the subject, or in a sample derived from the subject.

[2280] In some embodiments, the predictive method comprises:
[2281] (a) determining if a subject is susceptible to treatment with an agent capable of inhibiting or reversing EMT or a chemotherapeutic agent by assessing the activity, expression, or amount of one or more biomarker in the subject, or in a sample derived from the subject, wherein the one or more biomarker is selected from the group consisting of: HB-EGF, AFP, CgA, Nr-CAM, KIM-1, CD40, LAP TGF-b1, EGF, IL-2 receptor alpha, hCG, TARO, CD40-L, VEGFR-3, TATI, MMP-7, Leptin, Apo A-I, Periostin, ANG-2, Cystatin-C, Hepsin Apo C-I, IL-1RI, Eotaxin-2, MPO, FRTN, Axl, and/or LDH;
[2282] (b) administering to the subject a therapeutically effective amount of an agent capable of inhibiting or reversing EMT or a chemotherapeutic agent; and
[2283] (c) subsequently assessing the activity, expression, or amount of one or more biomarker in the subject, or in a sample derived from the subject.

[2284] In some preferred embodiments the methods comprise subsequently assessing the activity, expression, or amount of HB-EGF, AFP, CgA, Nr-CAM, KIM-1, CD40, LAP TGF-b1, EGF, Axl, and/or LDH in the subject, or in a sample derived from the subject. In some embodiments an increase in the activity, expression, or amount of HB-EGF, AFP, CgA, Nr-CAM, KIM-1, CD40, LAP TGF-b1, EGF, Axl, and/or LDH in the second sample profile as compared with a control profile after contacting the subject with a cancer therapeutic agent is indicative of higher susceptibility to treatment with an agent capable of inhibiting or reversing EMT or a chemotherapeutic agent. In some preferred embodiments the control profile is obtained from the same subject prior to treatment with an agent capable of inhibiting or reversing EMT or a chemotherapeutic agent.

[2285] Post-Treatment Predictive Biomarkers and Methods

[2286] By analysing patient data obtained from clinical trial BGBIL006 (NCT02872259), the authors have discovered that, following treatment of subjects having melanoma with an agent capable of inhibiting or reversing EMT or a chemotherapeutic agent, the levels of certain of the biomarkers described herein increases in the serum of “responder” subjects but not in the serum of “non-responder” subjects. Similarly, following treatment with an agent capable of inhibiting or reversing EMT or a chemotherapeutic agent, the levels of certain of the biomarkers described herein decreases in the serum of “responder” subjects but not in the serum of “non-responder” subjects. Thus, by assessing the activity, expression, or amount of one or more of the biomarkers described herein prior to and following treatment with an agent capable of inhibiting or reversing EMT or a chemotherapeutic agent it is possible to determine or confirm that the subject is susceptible or responsive to treatment with said agent.

[2287] Accordingly, in an second aspect of this facet the disclosure provides a method of predicting a cancer-related outcome in a subject having, suspected of having, or diagnosed with melanoma, the method comprising assessing the activity, expression, or amount of one or more of the biomarkers described herein in a subject, or in a sample derived from the subject after the subject has been contacted with an agent capable of inhibiting or reversing EMT or a chemotherapeutic agent. In some embodiments the cancer-related outcome is susceptibility to treatment with an agent capable of inhibiting or reversing EMT or a chemotherapeutic agent.

[2288] In some embodiments the method comprises assessing the activity, expression, or amount of one or more of the biomarkers described herein in the subject, or in a sample derived from the subject, to obtain a sample profile of the one or more biomarker; and, making a prediction based on the sample profile of the one or more biomarker. In some embodiments of the method the prediction is made by comparing the sample profile to a control profile. In preferred embodiments the sample profile is obtained after contacting the subject with an agent capable of inhibiting or reversing EMT or a chemotherapeutic agent.

[2289] A “control profile” as used herein is a profile of numerical values or numerical ranges corresponding to the activity, expression, or amount of the same biomarkers as for the sample profile, determined in a control subject or population of control subjects.

[2290] In preferred embodiments of this aspect of the disclosure the control profile is obtained from the same subject prior to treatment with an agent capable of inhibiting or reversing EMT or a chemotherapeutic agent. In some embodiments the control profile is obtained from a population of control subjects having melanoma. In other embodiments, the control profile is a predetermined profile of biomarker expression, activity, or amount values, for example a profile of “threshold” values or “standard ranges” of values.

[2291] Accordingly, in embodiments in which the control profile is obtained from the same subject prior to treatment with an agent capable of inhibiting or reversing EMT or a chemotherapeutic agent, an increase in the activity, expression, or amount of one or more biomarker in the sample profile as compared with a control profile after contacting the subject with an agent capable of inhibiting or reversing EMT or a cancer therapeutic agent may be indicative of susceptibility to treatment with an agent capable of inhibiting or reversing EMT or a chemotherapeutic agent. In such embodiments, a decrease in the activity, expression, or amount of one or more biomarker in the sample profile as compared with a control profile after contacting the subject with a cancer therapeutic agent may be indicative of higher susceptibility to treatment with an agent capable of inhibiting or reversing EMT or a chemotherapeutic agent.

[2292] In some such embodiments, an increase in the activity, expression, or amount of one or more biomarker in the sample profile as compared with a control profile after contacting the subject with a cancer therapeutic agent may be indicative of lower susceptibility to treatment with an agent capable of inhibiting or reversing EMT or a chemotherapeutic agent. In some such embodiments, a decrease in the activity, expression, or amount of one or more biomarker in the sample profile as compared with a control profile after contacting the subject with a cancer therapeutic agent may be indicative of lower susceptibility to treatment with an agent capable of inhibiting or reversing EMT or a chemotherapeutic agent.

[2293] In some preferred embodiments the one or more biomarker includes at least HB-EGF. In some embodiments the one or more biomarker is HB-EGF. In some embodiments an increase in the activity, expression, or amount of HB-EGF in the sample profile as compared with a control profile after contacting the subject with a cancer therapeutic agent is indicative of higher susceptibility to treatment with an agent capable of inhibiting or reversing EMT or a chemotherapeutic agent.

[2294] In some preferred embodiments the one or more biomarker includes at least AFP. In some embodiments the one or more biomarker is AFP. In some embodiments an increase in the activity, expression, or amount of AFP in the sample profile as compared with a control profile after contacting the subject with a cancer therapeutic agent is indicative of higher susceptibility to treatment with an agent capable of inhibiting or reversing EMT or a chemotherapeutic agent.

[2295] In some preferred embodiments the one or more biomarker includes at least CgA. In some embodiments the one or more biomarker is CgA. In some embodiments an increase in the activity, expression, or amount of CgA in the sample profile as compared with a control profile after contacting the subject with a cancer therapeutic agent is indicative of higher susceptibility to treatment with an agent capable of inhibiting or reversing EMT or a chemotherapeutic agent.

[2296] In some preferred embodiments the one or more biomarker includes at least Nr-CAM. In some embodiments the one or more biomarker is Nr-CAM. In some embodiments an increase in the activity, expression, or amount of Nr-CAM in the sample profile as compared with a control profile after contacting the subject with a cancer therapeutic agent is indicative of higher susceptibility to treatment with an agent capable of inhibiting or reversing EMT or a chemotherapeutic agent.

[2297] In some preferred embodiments the one or more biomarker includes at least KIM-1. In some embodiments the one or more biomarker is KIM-1. In some embodiments an increase in the activity, expression, or amount of KIM-1 in the sample profile as compared with a control profile after contacting the subject with a cancer therapeutic agent is indicative of higher susceptibility to treatment with an agent capable of inhibiting or reversing EMT or a chemotherapeutic agent.

[2298] In some preferred embodiments the one or more biomarker includes at least CD40. In some embodiments the one or more biomarker is CD40. In some embodiments an increase in the activity, expression, or amount of CD40 in the sample profile as compared with a control profile after contacting the subject with a cancer therapeutic agent is indicative of higher susceptibility to treatment with an agent capable of inhibiting or reversing EMT or a chemotherapeutic agent.

[2299] In some preferred embodiments the one or more biomarker includes at least LAP TGF-b1. In some embodiments the one or more biomarker is LAP TGF-b1. In some embodiments an increase in the activity, expression, or amount of LAP TGF-b1 in the sample profile as compared with a control profile after contacting the subject with a cancer therapeutic agent is indicative of higher susceptibility to treatment with an agent capable of inhibiting or reversing EMT or a chemotherapeutic agent.

[2300] In some preferred embodiments the one or more biomarker includes at least EGF. In some embodiments the one or more biomarker is EGF. In some embodiments an increase in the activity, expression, or amount of EGF in the sample profile as compared with a control profile after contacting the subject with a cancer therapeutic agent is indicative of higher susceptibility to treatment with an agent capable of inhibiting or reversing EMT or a chemotherapeutic agent.

[2301] In some preferred embodiments the one or more biomarker includes at least Axl. In some embodiments the one or more biomarker is Axl. In some embodiments an increase in the activity, expression, or amount of Axl in the sample profile as compared with a control profile after contacting the subject with a cancer therapeutic agent is indicative of higher susceptibility to treatment with an agent capable of inhibiting or reversing EMT or a chemotherapeutic agent.

[2302] Subject

[2303] A “subject” as referred to herein is any species of animal classified as a mammal, and includes but is not restricted to, domestic and farm animals, primates and humans. In some preferred embodiments the subject is a human of any sex or race. In some embodiments, the human is an adult human.

[2304] In some embodiments of this aspect of the disclosure, the subject was selected for treatment with the agent capable of inhibiting or reversing EMT or a chemotherapeutic agent, using a predictive method according to the first aspect of this facet of the disclosure outlined above.

[2305] Agents Capable of Inhibiting or Reversing EMT

[2306] The present disclosure provides methods for predicting a cancer-related outcome in a subject having, suspected of having, or diagnosed with melanoma. A “cancer-related outcome” is a clinical prediction or prognosis associated with cancer.

[2307] The agents capable of inhibiting or reversing EMT for use in this melenoma facet of the disclosure are defined as described above in the AML facet (see identically titled section above on page 14, line 19 to page 17, line 2), except with preferred embodiments as set out below.

[2308] In some preferred embodiments the further cancer treatment is a PD-1 inhibitor or PD-L1 inhibitor. In some preferred embodiments the further cancer treatment is a monoclonal antibody such as pembrolizumab, alemtuzumab, bevacizumab, cetuximab, ibritumomab tiuxetan, or rituximab, or is a B-Raf inhibitor such as debrafenib, a MEK inhibitor such as trametinib or a combination therapy of these agents. In some particularly preferred embodiments the further cancer treatment is pembrolizumab. In other particularly preferred embodiments the further cancer treatment is a combination therapy of debrafenib and trametinib.

[2309] Assessing Biomarker Activity, Expression, Amount

[2310] In some embodiments of the predictive methods described herein, assessing the activity, expression, or amount of one or more biomarker in a subject, or in a sample derived from a subject, comprises: contacting a sample, or an extract from a sample, with at least 1, 2, 3, 4, 5, 6, 7, 8, 9, 10 or more reagents for detecting the activity, expression, or amount of one or more biomarkers, each of which is selective for a particular biomarker; and, detecting and/or quantifying said reagents for detecting.

[2311] In some embodiments comprising assessing the activity of LDH, assessing the activity of LDH comprises determining the enzymatic activity of LDH in the subject or sample derived from the subject. Preferably the enzymatic activity is assessed by determining the level or amount of a substrate or product of the enzymatic reaction catalysed by LDH in the subject or sample derived from the subject. In particularly preferred embodiments the enzymatic activity is assessed by determining the level or amount of reduced nicotinamide adenine dinucleotide (NADH) in the subject or sample derived from the subject. In some embodiments this may be determined using a colorimetric assay, for example, the colorimetric assay available from Sigma-Aldrich with catalogue number MAK066. Other suitable assays for assessing activity of LDH are well known to the skilled person. In particularly preferred embodiments the activity of LDH is assessed by determining the enzymatic activity of LDH in blood or serum.

[2312] In some preferred embodiments, assessing the expression or amount of the one or more biomarker comprises determining the level of the one or more biomarker protein or mRNA in the subject or sample derived from the subject. Preferably the expression or amount of the one or more biomarker is assessed by determining the level of protein expression. In particularly preferred embodiments the expression or amount of the one or more biomarker is assessed by determining the level of protein expression in serum.

[2313] The term “expression” refers to the transcription of a gene's DNA template to produce the corresponding mRNA and translation of this mRNA to produce the corresponding gene product (i.e., a peptide, polypeptide, or protein) as well as the “expression” of a protein in one or more forms that may have been modified post translation.

[2314] In some embodiments determining the level of the one or more biomarker protein or mRNA comprises: contacting a sample, or an extract from a sample, with at least 1, 2, 3, 4, 5, 6, 7, 8, 9, 10 or more specific binding members, each of which selectively binds to a respective biomarker protein or mRNA; and, detecting and/or quantifying formation of complex formed by said specific binding member and said biomarker protein or mRNA. In some embodiments the specific binding member may comprise an antibody molecule or a binding fragment thereof.

[2315] A range of suitable techniques for determining protein and mRNA expression levels are well known in the art, for example microarray analysis, Western blotting, and PCR techniques such as QPCR. In some embodiments, determining the expression or amount of the one or more biomarker protein or mRNA may comprise use of a technique selected from: Western blot; enzyme-linked immunosorbent assay (ELISA); radioimmunoassay (RIA); competitive enzyme immunoassay; double antibody sandwich ELISA (DAS-ELISA); liquid immunoarray technology; immunocytochemistry; immunohistochemistry; antibody microarray detection; precipitation of colloidal gold; affinity chromatography; ligand binding assay; and lectin binding assay.

[2316] In some embodiments, the expression or amount of the one or more biomarker is determined as an absolute amount of the respective biomarker protein or mRNA in the sample. In such cases, the respective biomarker protein or mRNA may be quantified in the sample and the amount expressed as a measure of the sample, for example the volume, mass, or total protein content of the sample.

[2317] In some embodiments, the expression or amount of the one or more biomarker is determined as a relative amount of the respective biomarker protein or mRNA in the sample, wherein the relative amount is determined relative to a reference protein or mRNA in the sample. Determining the relative amount of biomarker protein or mRNA in this way allows for normalisation to, e.g., account for differences in total protein concentration and to remove bias from sample to sample.

[2318] Preferably the reference protein or mRNA is one whose expression or amount does not vary significantly between subjects having cancer and subjects not having cancer, in particular melanoma. That is, the reference protein or mRNA is preferably one whose expression or amount is not altered by melanoma.

[2319] Accordingly, the reference protein or mRNA may comprise one or more protein or mRNA which is not one of the biomarkers described herein. When expressing the expression or amount of the one or more biomarker as a relative amount, the absolute amount of the respective biomarker protein or mRNA in the sample may be divided by the absolute amount of the reference protein or mRNA in the sample.

[2320] Assessing Biomarker Expression at the RNA Level

[2321] Gene expression can be detected at the RNA level. RNA may be extracted from cells using RNA extraction techniques including, for example, using acid phenol/guanidine isothiocyanate extraction (RNAzol B; Biogenesis), RNeasy RNA preparation kits (Qiagen) or PAXgene (PreAnalytix, Switzerland). Typical assay formats utilising ribonucleic acid hybridisation include nuclear run-on assays, RT-PCR, RNase protection assays (Melton et al., Nuc. Acids Res. 12:7035), Northern blotting and In Situ hybridization. Gene expression can also be detected by microarray analysis as described below.

[2322] Assessing Biomarker Expression at the Protein Level

[2323] Preferably biomarker level is assessed by measuring protein expression. Altered gene or protein expression may also be detected by measuring the polypeptides encoded by the gene. This may be achieved by using molecules which bind to the polypeptides encoded by the biomarker gene. Suitable molecules/agents which bind either directly or indirectly to the polypeptides in order to detect the presence of the protein include naturally occurring molecules such as peptides and proteins, for example antibodies, or they may be synthetic molecules.

[2324] Antibodies may be derived from commercial sources or through techniques which are familiar to those skilled in the art. In one embodiment, and where altered expression manifests itself through the expression of alteration of post translationally-modified forms of a protein biomarker, antibodies specific for those different forms may be used. For the purposes of this disclosure, the term “antibody”, unless specified to the contrary, includes whole antibodies, or fragments of whole antibodies which retain their binding activity for a target antigen. Such fragments include Fv, F(ab′) and F(ab′)2 fragments, as well as single chain antibodies (scFv). Furthermore, the antibodies and fragments thereof may be humanised antibodies, for example as described in EP239400A. For example: monoclonal and polyclonal antibodies, recombinant antibodies, proteolytic and recombinant fragments of antibodies (Fab, Fv, scFv, diabodies), single-domain antibodies (VHH, sdAb, nanobodies, IgNAR, VNAR), and proteins unrelated to antibodies, which have been engineered to have antibody-like specific binding. Antibodies may be bound to a solid support and/or packaged into kits in a suitable container along with suitable reagents, controls, instructions and the like.

[2325] Arrays

[2326] Array technology and the various techniques and applications associated with it are well known in the art. Array technology overcomes the disadvantages with traditional methods in molecular biology, which generally work on a “one gene in one experiment” basis, resulting in low throughput and the inability to appreciate the “whole picture” of gene function. In the context of the products and methods of the present disclosure, array technology can be used, for example, in the analysis of the expression of biomarker proteins or mRNA.

[2327] In general, any library or group of samples may be arranged in an orderly manner into an array, by spatially separating the members of the library or group. Examples of suitable libraries for arraying include nucleic acid libraries (including DNA, cDNA, oligonucleotide, etc. libraries), peptide, polypeptide and protein libraries, as well as libraries comprising any molecules, such as ligand libraries, among others. Accordingly, where reference is made to a “library” in this document, unless the context dictates otherwise, such reference should be taken to include reference to a library in the form of an array.

[2328] Proteins, polypeptides, etc., may also be immobilised in arrays. For example, antibodies have been used in microarray analysis of the proteome using protein chips (Borrebaeck C A, 2000, Immunol Today 21(8):379-82). Polypeptide arrays are reviewed in, for example, MacBeath and Schreiber, 2000, Science, 289(5485):1760-1763.

[2329] Sample

[2330] Suitable samples include, but are not limited to, tissue samples such as tissue biopsy, blood, urine, buccal scrapes etc., as well as serum, plasma, or tissue culture supernatant samples. In preferred embodiments the expression or amount of the one or more biomarker is assessed by determining the level of protein expression in the sample. In some preferred embodiments the sample is a blood, serum, or plasma sample. In some particularly preferred embodiments the sample is a serum sample.

[2331] When assessing the expression or amount of the one or more biomarker proteins or mRNA in serum or plasma samples derived from a subject, samples are removed and subjected to analytical techniques such as flow cytometry, mass cytometry (CyTOF), ELISA, PET, and SELDI-TOF MS. In some embodiments, the method may comprise extracting RNA from said sample and detecting gene expression by QPCR. In some other embodiments, gene expression may be detected by detecting protein products by, for example, Western Blot.

[2332] In some embodiments, the level of expression of the one or more biomarker is assessed by determining the copy number of the gene encoding the one or more biomarker. Copy number (i.e. gene duplication events) may be determined using standard techniques known in the art, e.g. using a DNA chip as described in Jiang et al. (Jiang Q, Ho Y Y, Hao L, Nichols Berrios C, Chakravarti A. Copy number variants in candidate genes are genetic modifiers of Hirschsprung disease. PLoS One. 2011; 6(6)).

[2333] Is some preferred embodiments of the predictive methods described herein, the method is performed in vitro or ex vivo.

[2334] Methods of Selecting a Subject for Treatment

[2335] A third aspect of this facet of the present disclosure relates to methods of selecting subjects having, suspected of having, or diagnosed with melanoma for treatment with an agent capable of inhibiting or reversing EMT or a chemotherapeutic agent. In some embodiments the method comprises: identifying subjects susceptible to treatment with an agent capable of inhibiting or reversing EMT or a chemotherapeutic agent using a predictive method defined in accordance with the above described first and second aspects of this facet of the disclosure; and, selecting thus identified subjects for treatment.

[2336] In some embodiments this aspect relates to methods of selecting subjects having, suspected of having, or diagnosed with melanoma for continued treatment with an agent capable of inhibiting or reversing EMT or a chemotherapeutic agent. In some embodiments the method comprises: identifying subjects susceptible to treatment with an agent capable of inhibiting or reversing EMT or a chemotherapeutic agent using a predictive method defined in accordance with the above described second aspect of the disclosure; and, selecting thus identified subjects for treatment.

[2337] In some embodiments of this aspect of the disclosure, the treatment comprises administering to the subject a therapeutically effective amount of an agent capable of inhibiting or reversing EMT or a chemotherapeutic agent as described herein. Accordingly, in some embodiments the treatment comprises an Axl inhibitor, Akt3 inhibitor, Slfn11 inhibitor, or PHGDH inhibitor. In some preferred embodiments the treatment comprises an Axl inhibitor, for example, BGB324/R428/bemcentinib, cabozantinib, TP-0903, foretinib, merestinib, bosutinib, gilteritinib, crizotinib, amuvatinib, sunitinib, sitravatinib, LDC1267, or UNC2025. Other Axl inhibitors include the anti-Axl antibodies described in WO2015/193428, WO2015/193430, WO2016/097370, and WO2016/166296. In some preferred embodiments the Axl inhibitor is an anti-Axl antibody described in WO2015/193428, WO2015/193430, WO2016/097370, or WO2016/166296. In some particularly preferred embodiments the Axl inhibitor is BGB324/R428/bemcentinib.

[2338] In some other preferred embodiments, the treatment comprises an Akt3 inhibitor. In some embodiments the Akt3 inhibitor is an Akt3 inhibitor disclosed in WO2016/102672.

[2339] In some embodiments of this aspect of the disclosure, the treatment is administered as a single agent. In other embodiments, the treatment is administered in combination with a further cancer treatment. Suitable further cancer treatments are outlined in detail above. In some preferred embodiments the further cancer treatment is a PD-1 inhibitor or PD-L1 inhibitor. In some embodiments the further cancer treatment is a monoclonal antibody such as pembrolizumab, alemtuzumab, bevacizumab, cetuximab, ibritumomab tiuxetan, or rituximab, or is a B-Raf inhibitor such as debrafenib, a MEK inhibitor such as trametinib or a combination therapy of these agents. In some particularly preferred embodiments the further cancer treatment is pembrolizumab. In other particularly preferred embodiments the further cancer treatment is a combination therapy of debrafenib and trametinib.

[2340] Kits

[2341] A fourth aspect of this facet of the present disclosure relates to diagnostic kits and test devices. In some embodiments the disclosure provides a diagnostic kit comprising 1, 2, 3, 4, 5, 6, 7, 8, 9, 10 or more reagents for detecting the activity, expression, or amount of one or more of the biomarkers described herein, each of which is selective for a particular biomarker. In some embodiments each of the reagents for detecting is selective for a biomarker selected from the group consisting of: HB-EGF, AFP, CgA, Nr-CAM, KIM-1, CD40, LAP TGF-b1, EGF, IL-2 receptor alpha, hCG, TARC, CD40-L, VEGFR-3, TATI, MMP-7, Leptin, Apo A-I, Periostin, ANG-2, Cystatin-C, Hepsin Apo C-I, IL-1RI, Eotaxin-2, MPO, FRTN, Axl, and/or LDH.

[2342] In other embodiments the disclosure provides a test device comprising 1, 2, 3, 4, 5, 6, 7, 8, 9, 10 or more reagents for detecting the activity, expression, or amount of one or more of the biomarkers described herein, each of which is selective for a particular biomarker. In some embodiments each of the reagents for detecting is selective for a biomarker selected from the group consisting of: HB-EGF, AFP, CgA, Nr-CAM, KIM-1, CD40, LAP TGF-b1, EGF, IL-2 receptor alpha, hCG, TARC, CD40-L, VEGFR-3, TATI, MMP-7, Leptin, Apo A-I, Periostin, ANG-2, Cystatin-C, Hepsin Apo C-I, IL-1RI, Eotaxin-2, MPO, FRTN, Axl, and/or LDH.

[2343] In some embodiments the diagnostic kit or test device comprises 1, 2, 3, 4, 5, 6, 7, 8, 9, 10 or more specific binding members, each of which selectively binds to one of the biomarkers described herein; and, one or more reagents for detecting said one or more specific binding members, or one or more reagents for detecting and/or quantifying formation of a complex formed by said specific binding member and said biomarker. In some embodiments each specific binding member selectively binds to a biomarker selected from the group consisting of: HB-EGF, AFP, CgA, Nr-CAM, KIM-1, CD40, LAP TGF-b1, EGF, IL-2 receptor alpha, hCG, TARC, CD40-L, VEGFR-3, TATI, MMP-7, Leptin, Apo A-I, Periostin, ANG-2, Cystatin-C, Hepsin Apo C-I, IL-1RI, Eotaxin-2, MPO, FRTN, Axl, and/or LDH.

[2344] In some embodiments the diagnostic kit or test device comprises a specific binding member which selectively binds to Axl, and at least 1, 2, 3, 4, 5, 6, 7, 8, 9, 10, or more specific binding members, each of which selectively binds to a biomarker selected from the group consisting of: HB-EGF, AFP, CgA, Nr-CAM, KIM-1, CD40, LAP TGF-b1, EGF, IL-2 receptor alpha, hCG, TARC, CD40-L, VEGFR-3, TATI, MMP-7, Leptin, Apo A-I, Periostin, ANG-2, Cystatin-C, Hepsin Apo C-I, IL-1RI, Eotaxin-2, MPO, FRTN, and/or LDH. In some embodiments the diagnostic kit or test device comprises a specific binding member which selectively binds to LDH, and at least 1, 2, 3, 4, 5, 6, 7, 8, 9, 10, or more specific binding members, each of which selectively binds to a biomarker selected from the group consisting of: HB-EGF, AFP, CgA, Nr-CAM, KIM-1, CD40, LAP TGF-b1, EGF, IL-2 receptor alpha, hCG, TARC, CD40-L, VEGFR-3, TATI, MMP-7, Leptin, Apo A-I, Periostin, ANG-2, Cystatin-C, Hepsin Apo C-I, IL-1RI, Eotaxin-2, MPO, FRTN, and/or Axl. In some embodiments the diagnostic kit or test device comprises a specific binding member which selectively binds to HB-EGF, and at least 1, 2, 3, 4, 5, 6, 7, 8, 9, 10, or more specific binding members, each of which selectively binds to a biomarker selected from the group consisting of: AFP, CgA, Nr-CAM, KIM-1, CD40, LAP TGF-b1, EGF, IL-2 receptor alpha, hCG, TARC, CD40-L, VEGFR-3, TATI, MMP-7, Leptin, Apo A-I, Periostin, ANG-2, Cystatin-C, Hepsin Apo C-I, IL-1RI, Eotaxin-2, MPO, FRTN, Axl, and/or LDH. In some embodiments the diagnostic kit or test device comprises a specific binding member which selectively binds to AFP, and at least 1, 2, 3, 4, 5, 6, 7, 8, 9, 10, or more specific binding members, each of which selectively binds to a biomarker selected from the group consisting of: HB-EGF, CgA, Nr-CAM, KIM-1, CD40, LAP TGF-b1, EGF, IL-2 receptor alpha, hCG, TARC, CD40-L, VEGFR-3, TATI, MMP-7, Leptin, Apo A-I, Periostin, ANG-2, Cystatin-C, Hepsin Apo C-I, IL-1RI, Eotaxin-2, MPO, FRTN, Axl, and/or LDH. In some embodiments the diagnostic kit or test device comprises a specific binding member which selectively binds to CgA, and at least 1, 2, 3, 4, 5, 6, 7, 8, 9, 10, or more specific binding members, each of which selectively binds to a biomarker selected from the group consisting of: HB-EGF, AFP, Nr-CAM, KIM-1, CD40, LAP TGF-b1, EGF, IL-2 receptor alpha, hCG, TARC, CD40-L, VEGFR-3, TATI, MMP-7, Leptin, Apo A-I, Periostin, ANG-2, Cystatin-C, Hepsin Apo C-I, IL-1RI, Eotaxin-2, MPO, FRTN, Axl, and/or LDH. In some embodiments the diagnostic kit or test device comprises a specific binding member which selectively binds to Nr-CAM, and at least 1, 2, 3, 4, 5, 6, 7, 8, 9, 10, or more specific binding members, each of which selectively binds to a biomarker selected from the group consisting of: HB-EGF, AFP, CgA, KIM-1, CD40, LAP TGF-b1, EGF, IL-2 receptor alpha, hCG, TARC, CD40-L, VEGFR-3, TATI, MMP-7, Leptin, Apo A-I, Periostin, ANG-2, Cystatin-C, Hepsin Apo C-I, IL-1RI, Eotaxin-2, MPO, FRTN, Axl, and/or LDH. In some embodiments the diagnostic kit or test device comprises a specific binding member which selectively binds to KIM-1, and at least 1, 2, 3, 4, 5, 6, 7, 8, 9, 10, or more specific binding members, each of which selectively binds to a biomarker selected from the group consisting of: HB-EGF, AFP, CgA, Nr-CAM, CD40, LAP TGF-b1, EGF, IL-2 receptor alpha, hCG, TARC, CD40-L, VEGFR-3, TATI, MMP-7, Leptin, Apo A-I, Periostin, ANG-2, Cystatin-C, Hepsin Apo C-I, IL-1RI, Eotaxin-2, MPO, FRTN, Axl, and/or LDH. In some embodiments the diagnostic kit or test device comprises a specific binding member which selectively binds to CD40, and at least 1, 2, 3, 4, 5, 6, 7, 8, 9, 10, or more specific binding members, each of which selectively binds to a biomarker selected from the group consisting of: HB-EGF, AFP, CgA, Nr-CAM, KIM-1, LAP TGF-b1, EGF, IL-2 receptor alpha, hCG, TARC, CD40-L, VEGFR-3, TATI, MMP-7, Leptin, Apo A-I, Periostin, ANG-2, Cystatin-C, Hepsin Apo C-I, IL-1RI, Eotaxin-2, MPO, FRTN, Axl, and/or LDH. In some embodiments the diagnostic kit or test device comprises a specific binding member which selectively binds to LAP-TGF b1, and at least 1, 2, 3, 4, 5, 6, 7, 8, 9, 10, or more specific binding members, each of which selectively binds to a biomarker selected from the group consisting of: HB-EGF, AFP, CgA, Nr-CAM, KIM-1, CD40, EGF, IL-2 receptor alpha, hCG, TARO, CD40-L, VEGFR-3, TATI, MMP-7, Leptin, Apo A-I, Periostin, ANG-2, Cystatin-C, Hepsin Apo C-I, IL-1RI, Eotaxin-2, MPO, FRTN, Axl, and/or LDH. In some embodiments the diagnostic kit or test device comprises a specific binding member which selectively binds to EGF, and at least 1, 2, 3, 4, 5, 6, 7, 8, 9, 10, or more specific binding members, each of which selectively binds to a biomarker selected from the group consisting of: HB-EGF, AFP, CgA, Nr-CAM, KIM-1, CD40, LAP TGF-b1, IL-2 receptor alpha, hCG, TARC, CD40-L, VEGFR-3, TATI, MMP-7, Leptin, Apo A-I, Periostin, ANG-2, Cystatin-C, Hepsin Apo C-I, IL-1RI, Eotaxin-2, MPO, FRTN, Axl, and/or LDH. In some embodiments the diagnostic kit or test device comprises a specific binding member which selectively binds to TATI, and at least 1, 2, 3, 4, 5, 6, 7, 8, 9, 10, or more specific binding members, each of which selectively binds to a biomarker selected from the group consisting of: HB-EGF, AFP, CgA, Nr-CAM, KIM-1, CD40, LAP TGF-b1, EGF, IL-2 receptor alpha, hCG, TARC, CD40-L, VEGFR-3, MMP-7, Leptin, Apo A-I, Periostin, ANG-2, Cystatin-C, Hepsin Apo C-I, IL-1RI, Eotaxin-2, MPO, FRTN, Axl, and/or LDH.

[2345] In some embodiments the diagnostic kit or test device comprises a specific binding member which selectively binds to HB-EGF, a specific binding member which selectively binds to AFP, a specific binding member which selectively binds to CgA, and at least 1, 2, 3, 4, 5, 6, 7, 8, 9, 10, or more specific binding members, each of which selectively binds to a biomarker selected from the group consisting of: Nr-CAM, KIM-1, CD40, LAP TGF-b1, EGF, IL-2 receptor alpha, hCG, TARC, CD40-L, VEGFR-3, TATI, MMP-7, Leptin, Apo A-I, Periostin, ANG-2, Cystatin-C, Hepsin Apo C-I, IL-1RI, Eotaxin-2, MPO, FRTN, Axl, and/or LDH.

[2346] In some embodiments of this aspect of the disclosure the diagnostic kit or test device comprises a plurality of said specific binding members provided in the form of an array on a substrate or conjugated to a plurality of particles, such as beads or microspheres. The particles may be encoded with a detectable label. In some embodiments the specific binding member comprises an antibody molecule or a binding fragment thereof.

[2347] In some embodiments of the diagnostic kit or test device detecting formation of a complex formed by a specific binding member and a biomarker is carried out by use of a technique selected from: Western blot; enzyme-linked immunosorbent assay (ELISA); radioimmunoassay (RIA); competitive enzyme immunoassay; double antibody sandwich ELISA (DAS-ELISA); liquid immunoarray technology; immunocytochemistry; immunohistochemistry; antibody microarray detection; precipitation of colloidal gold; affinity chromatography; ligand binding assay; and lectin binding assay.

[2348] In some embodiments of the diagnostic kit or test device, the kit or test device comprises no more than 15, 20, 25, 30, 40, or 50 reagents for detecting. In some embodiments of the diagnostic kit or test device, the kit or test device comprises no more than 15, 20, 25, 30, 40, or 50 specific binding members.

[2349] The present disclosure also provides use of such diagnostic kits and test devices in methods of predicting a cancer-related outcome in a subject. In preferred embodiments the cancer-related outcome is susceptibility to treatment with an agent capable of inhibiting or reversing EMT or a chemotherapeutic agent as described herein.

[2350] In some embodiments the agent capable of inhibiting or reversing EMT or chemotherapeutic agent is an Axl inhibitor, Akt3 inhibitor, Slfn11 inhibitor, or PHGDH inhibitor. In some preferred embodiments the agent capable of inhibiting or reversing EMT or chemotherapeutic agent is an Axl inhibitor, for example BGB324/R428/bemcentinib, cabozantinib, TP-0903, foretinib, merestinib, bosutinib, gilteritinib, crizotinib, amuvatinib, sunitinib, sitravatinib, LDC1267, or UNC2025. Other Axl inhibitors include the anti-Axl antibodies described in WO2015/193428, WO2015/193430, WO2016/097370, and WO2016/166296. In some preferred embodiments the Axl inhibitor is an anti-Axl antibody described in WO2015/193428, WO2015/193430, WO2016/097370, or WO2016/166296. In some particularly preferred embodiments the Axl inhibitor is BGB324/R428/bemcentinib.

[2351] In some embodiments of the diagnostic kit or test device for use in a predictive method, the subject has, is suspected of having, or has been diagnosed with melanoma.

[2352] In some embodiments the method may be as defined in accordance with the above described first and second aspects of this facet of the disclosure.

[2353] A fifth aspect of this facet of the present disclosure relates to the use of a reagent for detecting the activity, expression, or amount of a biomarker selected from the group consisting of: HB-EGF, AFP, CgA, Nr-CAM, KIM-1, CD40, LAP TGF-b1, EGF, IL-2 receptor alpha, hCG, TARO, CD40-L, VEGFR-3, TATI, MMP-7, Leptin, Apo A-I, Periostin, ANG-2, Cystatin-C, Hepsin Apo C-I, IL-1RI, Eotaxin-2, MPO, FRTN, Axl, and/or LDH, in a method of predicting a cancer-related outcome in a subject.

[2354] A sixth aspect of this facet of the disclosure relates to the use of 1, 2, 3, 4, 5, 6, 7, 8, 9, 10 or more reagents for detecting the activity, expression, or amount a biomarker, each of which is selective for a particular biomarker selected from the group consisting of: HB-EGF, AFP, CgA, Nr-CAM, KIM-1, CD40, LAP TGF-b1, EGF, IL-2 receptor alpha, hCG, TARC, CD40-L, VEGFR-3, TATI, MMP-7, Leptin, Apo A-I, Periostin, ANG-2, Cystatin-C, Hepsin Apo C-I, IL-1RI, Eotaxin-2, MPO, FRTN, Axl, and/or LDH, in a method of manufacture of a diagnostic kit or test device for use in a method of predicting a cancer-related outcome in a subject. In some embodiments of these uses the reagent for detecting comprises a specific binding member selective for a particular biomarker. The specific binding member may comprise an antibody molecule or a binding fragment thereof.

[2355] In some embodiments the method may be as defined in accordance with the above described first and second aspects of this facet of the disclosure.

[2356] Uses

[2357] A seventh aspect of this facet of the present disclosure relates to the use of one or more of: HB-EGF, AFP, CgA, Nr-CAM, KIM-1, CD40, LAP TGF-b1, EGF, IL-2 receptor alpha, hCG, TARC, CD40-L, VEGFR-3, TATI, MMP-7, Leptin, Apo A-I, Periostin, ANG-2, Cystatin-C, Hepsin Apo C-I, IL-1RI, Eotaxin-2, MPO, FRTN, Axl, and/or LDH as a biomarker for determining if a subject is susceptible to treatment with an agent capable of inhibiting or reversing EMT or a chemotherapeutic agent.

[2358] In some embodiments the use relates to use of at least one of HB-EGF, AFP, CgA, Nr-CAM, KIM-1, CD40, LAP TGF-b1, EGF, TATI, Axl, And LDH; and at least 1, 2, 3, 4, 5, 6, 7, 8, 9, 10, or more of: IL-2 receptor alpha, hCG, TARC, CD40-L, VEGFR-3, TATI, MMP-7, Leptin, Apo A-I, Periostin, ANG-2, Cystatin-C, Hepsin Apo C-I, IL-1RI, Eotaxin-2, MPO, and/or FRTN, as a biomarker for determining if a subject is susceptible to treatment with an agent capable of inhibiting or reversing EMT or a chemotherapeutic agent. In some embodiments the use relates to use of HB-EGF, and at least 1, 2, 3, 4, 5, 6, 7, 8, 9, 10, or more of: AFP, CgA, Nr-CAM, KIM-1, CD40, LAP TGF-b1, EGF, IL-2 receptor alpha, hCG, TARC, CD40-L, VEGFR-3, TATI, MMP-7, Leptin, Apo A-I, Periostin, ANG-2, Cystatin-C, Hepsin Apo C-I, IL-1RI, Eotaxin-2, MPO, FRTN, Axl, and/or LDH, as a biomarker for determining if a subject is susceptible to treatment with an agent capable of inhibiting or reversing EMT or a chemotherapeutic agent. In some embodiments the use relates to use of AFP, and at least 1, 2, 3, 4, 5, 6, 7, 8, 9, 10, or more of: HB-EGF, CgA, Nr-CAM, KIM-1, CD40, LAP TGF-b1, EGF, IL-2 receptor alpha, hCG, TARC, CD40-L, VEGFR-3, TATI, MMP-7, Leptin, Apo A-I, Periostin, ANG-2, Cystatin-C, Hepsin Apo C-I, IL-1RI, Eotaxin-2, MPO, FRTN, Axl, and/or LDH, as a biomarker for determining if a subject is susceptible to treatment with an agent capable of inhibiting or reversing EMT or a chemotherapeutic agent. In some embodiments the use relates to use of CgA, and at least 1, 2, 3, 4, 5, 6, 7, 8, 9, 10, or more of: AFP, HB-EGF, Nr-CAM, KIM-1, CD40, LAP TGF-b1, EGF, IL-2 receptor alpha, hCG, TARC, CD40-L, VEGFR-3, TATI, MMP-7, Leptin, Apo A-I, Periostin, ANG-2, Cystatin-C, Hepsin Apo C-I, IL-1RI, Eotaxin-2, MPO, FRTN, Axl, and/or LDH, as a biomarker for determining if a subject is susceptible to treatment with an agent capable of inhibiting or reversing EMT or a chemotherapeutic agent. In some embodiments the use relates to use of Nr-CAM, and at least 1, 2, 3, 4, 5, 6, 7, 8, 9, 10, or more of: CgA, AFP, HB-EGF, KIM-1, CD40, LAP TGF-b1, EGF, IL-2 receptor alpha, hCG, TARO, CD40-L, VEGFR-3, TATI, MMP-7, Leptin, Apo A-I, Periostin, ANG-2, Cystatin-C, Hepsin Apo C-I, IL-1RI, Eotaxin-2, MPO, FRTN, Axl, and/or LDH, as a biomarker for determining if a subject is susceptible to treatment with an agent capable of inhibiting or reversing EMT or a chemotherapeutic agent. In some embodiments the use relates to use of KIM-1, and at least 1, 2, 3, 4, 5, 6, 7, 8, 9, 10, or more of: CgA, AFP, HB-EGF, Nr-CAM, CD40, LAP TGF-b1, EGF, IL-2 receptor alpha, hCG, TARC, CD40-L, VEGFR-3, TATI, MMP-7, Leptin, Apo A-I, Periostin, ANG-2, Cystatin-C, Hepsin Apo C-I, IL-1RI, Eotaxin-2, MPO, FRTN, Axl, and/or LDH, as a biomarker for determining if a subject is susceptible to treatment with an agent capable of inhibiting or reversing EMT or a chemotherapeutic agent. In some embodiments the use relates to use of CD40, and at least 1, 2, 3, 4, 5, 6, 7, 8, 9, 10, or more of: CgA, AFP, HB-EGF, Nr-CAM, KIM-1, LAP TGF-b1, EGF, IL-2 receptor alpha, hCG, TARC, CD40-L, VEGFR-3, TATI, MMP-7, Leptin, Apo A-I, Periostin, ANG-2, Cystatin-C, Hepsin Apo C-I, IL-1RI, Eotaxin-2, MPO, FRTN, Axl, and/or LDH, as a biomarker for determining if a subject is susceptible to treatment with an agent capable of inhibiting or reversing EMT or a chemotherapeutic agent. In some embodiments the use relates to use of LAP TGF-b1, and at least 1, 2, 3, 4, 5, 6, 7, 8, 9, 10, or more of: CgA, AFP, HB-EGF, Nr-CAM, KIM-1, CD40, LAP TGF-b1, EGF, IL-2 receptor alpha, hCG, TARC, CD40-L, VEGFR-3, TATI, MMP-7, Leptin, Apo A-I, Periostin, ANG-2, Cystatin-C, Hepsin Apo C-I, IL-1RI, Eotaxin-2, MPO, FRTN, Axl, and/or LDH, as a biomarker for determining if a subject is susceptible to treatment with an agent capable of inhibiting or reversing EMT or a chemotherapeutic agent. In some embodiments the use relates to use of EGF, and at least 1, 2, 3, 4, 5, 6, 7, 8, 9, 10, or more of: CgA, AFP, HB-EGF, Nr-CAM, KIM-1, CD40, LAP TGF-b1, IL-2 receptor alpha, hCG, TARC, CD40-L, VEGFR-3, TATI, MMP-7, Leptin, Apo A-I, Periostin, ANG-2, Cystatin-C, Hepsin Apo C-I, IL-1RI, Eotaxin-2, MPO, FRTN, Axl, and/or LDH, as a biomarker for determining if a subject is susceptible to treatment with an agent capable of inhibiting or reversing EMT or a chemotherapeutic agent. In some embodiments the use relates to use of TATI and at least 1, 2, 3, 4, 5, 6, 7, 8, 9, 10, or more of: CgA, AFP, HB-EGF, Nr-CAM, KIM-1, CD40, LAP TGF-b1, EGF, IL-2 receptor alpha, hCG, TARO, CD40-L, VEGFR-3, MMP-7, Leptin, Apo A-I, Periostin, ANG-2, Cystatin-C, Hepsin Apo C-I, IL-1RI, Eotaxin-2, MPO, FRTN, Axl, and/or LDH, as a biomarker for determining if a subject is susceptible to treatment with an agent capable of inhibiting or reversing EMT or a chemotherapeutic agent.

[2359] In some embodiments the use is as a biomarker in a method as defined in accordance with the above described first and second aspects of this facet of the disclosure.

[2360] Methods of Treating a Subject

[2361] A eighth aspect of this facet of the present disclosure relates to methods of treating a subject having, suspected of having, or diagnosed with melanoma. In some embodiments the method comprises: identifying a subject for treatment using a predictive method defined in accordance with the above described first and second aspects of this facet of the disclosure; and, administering to the subject a therapeutically effective amount of an agent capable of inhibiting or reversing EMT or a chemotherapeutic agent.

[2362] Accordingly, in some embodiments, the method comprises: (a) obtaining a sample from the subject; (b) determining if the subject is susceptible to treatment with an agent capable of inhibiting or reversing EMT or a chemotherapeutic agent using a predictive method defined in accordance with the above described first and second aspects of this facet of the disclosure; and, (c) administering to the subject a therapeutically effective amount of an agent capable of inhibiting or reversing EMT or a chemotherapeutic agent.

[2363] In some embodiments the method comprises administering a therapeutically effective amount of an agent capable of inhibiting or reversing EMT or chemotherapeutic agent to a subject identified as susceptible to said treatment using a predictive method defined in accordance with the above described first and second aspects of this facet of the disclosure.

[2364] In other embodiments the method comprises: (a) administering to a subject a therapeutically effective amount of an agent capable of inhibiting or reversing EMT or a chemotherapeutic agent; and, (b) determining if the subject is susceptible to said treatment using a predictive method defined in accordance with the above described second aspect of this facet of the disclosure. In some embodiments the method further comprises: (c) administering to the subject one or more further therapeutically effective amounts of an agent capable of inhibiting or reversing EMT or a chemotherapeutic agent provided that the subject is identified as susceptible to said treatment.

[2365] A ninth aspect of this facet of the present disclosure relates to an agent capable of inhibiting or reversing EMT or chemotherapeutic agent for use in a method of treating a subject having, suspected of having, or diagnosed with melanoma. In some embodiments the method of treatment is a method as defined above.

[2366] A tenth aspect of this facet of the present disclosure relates to use of an agent capable of inhibiting or reversing EMT or chemotherapeutic agent for use in a method of manufacture of a medicament for use in a method of treating a subject having, suspected of having, or diagnosed with melanoma. In some embodiments the method of treatment is a method as defined above.

[2367] In some embodiments of these methods, agents for use, or uses, the agent capable of inhibiting or reversing EMT or chemotherapeutic agent comprises an Axl inhibitor, Akt3 inhibitor, Slfn11 inhibitor, or PHGDH inhibitor. In some preferred embodiments the agent capable of inhibiting or reversing EMT or chemotherapeutic agent is an Axl inhibitor, for example BGB324/R428/bemcentinib, cabozantinib, TP-0903, foretinib, merestinib, bosutinib, gilteritinib, crizotinib, amuvatinib, sunitinib, sitravatinib, LDC1267, or UNC2025. Other Axl inhibitors include the anti-Axl antibodies described in WO2015/193428, WO2015/193430, WO2016/097370, and WO2016/166296. In some preferred embodiments the Axl inhibitor is an anti-Axl antibody described in WO2015/193428, WO2015/193430, WO2016/097370, or WO2016/166296. In some particularly preferred embodiments the Axl inhibitor is BGB324/R428/bemcentinib.

[2368] In some other preferred embodiments, the treatment comprises an Akt3 inhibitor. In some embodiments the Akt3 inhibitor is an Akt3 inhibitor disclosed in WO2016/102672.

[2369] In some embodiments of these methods, agents for use, or uses, the treatment is administered as a single agent. In other embodiments, the treatment is administered in combination with a further cancer treatment. Suitable further cancer treatments are outlined in detail above. In some preferred embodiments the further cancer treatment is a PD-1 inhibitor or PD-L1 inhibitor. In some embodiments the further cancer treatment is a monoclonal antibody such as pembrolizumab, alemtuzumab, bevacizumab, cetuximab, ibritumomab tiuxetan, or rituximab, or is a B-Raf inhibitor such as debrafenib, a MEK inhibitor such as trametinib or a combination therapy of these agents. In some particularly preferred embodiments the further cancer treatment is pembrolizumab. In other particularly preferred embodiments the further cancer treatment is a combination therapy of debrafenib and trametinib.

[2370] Statements of Disclosure

[2371] The following numbered statements relate to aspects of this facet of the present disclosure, and form part of the description:
[2372] 101. A method of predicting a cancer-related outcome in a subject, the method comprising assessing the activity, expression, or amount of one or more biomarker in the subject, or in a sample derived from the subject;
   [2373] wherein the one or more biomarker is selected from the group consisting of: HB-EGF, AFP, CgA, Nr-CAM, KIM-1, CD40, LAP TGF-b1, EGF, IL-2 receptor alpha, hCG, TARO, CD40-L, VEGFR-3, TATI, MMP-7, Leptin, Apo A-I, Periostin, ANG-2, Cystatin-C, Hepsin Apo C-I, IL-1 RI, Eotaxin-2, MPO, FRTN, Axl, and/or LDH; and
   [2374] wherein the subject has, is suspected of having, or has been diagnosed with melanoma.
[2375] 102. A method according to statement 101, wherein the method comprises:
   [2376] assessing the activity, expression, or amount of one or more biomarker in the subject, or in a sample derived from the subject, to obtain a sample profile of the one or more biomarker; and
   [2377] making a prediction based on the sample profile of the one or more biomarker.
[2378] 103. A method according to statement 102, wherein the prediction is made by comparing the sample profile to a control profile.
[2379] 104. A method according to statement 103, wherein the sample profile is obtained before the subject is contacted with or administered an agent capable of inhibiting or reversing EMT or a chemotherapeutic agent.
[2380] 105. A method according to statement 104, wherein the control profile is:
   [2381] (i) obtained from a population of control subjects having melanoma; or
   [2382] (ii) obtained from a control subject or population of control subjects having melanoma and previously found to lack susceptibility to treatment with an agent capable of inhibiting or reversing EMT or a chemotherapeutic agent (that is, non-responder subjects);
   [2383] (iii) a predetermined profile of biomarker expression, activity, or amount values, for example a profile of “average, median, or mean” values or “standard ranges” of values, obtained from a control subject or population of control subjects having melanoma and previously found to lack susceptibility to treatment with an agent capable of inhibiting or reversing EMT or a chemotherapeutic agent (that is, non-responder subjects);
   [2384] (iv) obtained from a control sample having a known “average, median, or mean” value of biomarkers indicative of a control subject or population of control subjects having melanoma and previously found to lack susceptibility to treatment with an agent capable of inhibiting or reversing EMT or a chemotherapeutic agent (that is, non-responder subjects);
   [2385] (v) a predetermined profile of biomarker expression, activity, or amount “threshold” values obtained from a control subject or population of control subjects having melanoma and previously found to be susceptible to treatment with an agent capable of inhibiting or reversing EMT or a chemotherapeutic agent (that is, responder subjects); or
   [2386] (vi) obtained from a control sample having a known “threshold” value of biomarkers indicative of a control subject or population of control subjects having melanoma and previously found to be susceptible to treatment with an agent capable of inhibiting or reversing EMT or a chemotherapeutic agent (that is, responder subjects).
[2387] 106. A method according to statement 105, wherein a higher activity, expression, or amount of one or more biomarker in the sample profile as compared with the control profile is indicative of susceptibility to treatment with an agent capable of inhibiting or reversing EMT or a chemotherapeutic agent.
[2388] 107. A method according to statement 105, wherein a lower activity, expression, or amount of one or more biomarker in the sample profile as compared with the control profile is indicative of susceptibility to treatment with an agent capable of inhibiting or reversing EMT or a chemotherapeutic agent.
[2389] 108. A method according to any one of statements 105-107, wherein the one or more biomarker includes at least one of: HB-EGF, CgA, Nr-CAM, KIM-1, CD40, LAP TGF-b1, EGF, IL-2 receptor alpha, TARC, CD40-L, VEGFR-3, TATI, MMP-7, Leptin, Apo A-I, ANG-2, Cystatin-C, Hepsin, Apo C-I, IL-1RI, Axl, and/or LDH,
   [2390] and wherein a higher activity, expression, or amount of one or more of said biomarkers in the sample profile as compared with the control profile is indicative of susceptibility to treatment with an agent capable of inhibiting or reversing EMT or a chemotherapeutic agent.
[2391] 109. A method according to any one of statements 105-108, wherein the one or more biomarker includes at least one of: AFP, Periostin, hCG, Eotaxin-2, MPO, and/or FRTN,
   [2392] and wherein a lower activity, expression, or amount of one or more of said biomarkers in the sample profile as compared with the control profile is indicative of susceptibility to treatment with an agent capable of inhibiting or reversing EMT or a chemotherapeutic agent.
[2393] 110. A method according to any one of statements 105-109, wherein:
   [2394] a lower activity, expression, or amount of AFP; and/or
   [2395] a lower activity, expression, or amount of Periostin; and/or
   [2396] a lower activity, expression, or amount of hCG; and/or
   [2397] a lower activity, expression, or amount of Eotaxin-2; and/or
   [2398] a lower activity, expression, or amount of MPO; and/or
   [2399] a lower activity, expression, or amount of FRTN; and/or
   [2400] a higher activity, expression, or amount of CgA; and/or
   [2401] a higher activity, expression, or amount of HB-EGF; and/or
   [2402] a higher activity, expression, or amount of Nr-CAM; and/or
   [2403] a higher activity, expression, or amount of KIM-1; and/or
   [2404] a higher activity, expression, or amount of CD40; and/or
   [2405] a higher activity, expression, or amount of LAP TGF-b1; and/or
   [2406] a higher activity, expression, or amount of EGF; and/or
   [2407] a higher activity, expression, or amount of IL-2ra; and/or
   [2408] a higher activity, expression, or amount of TARO; and/or
   [2409] a higher activity, expression, or amount of CD40-L; and/or
   [2410] a higher activity, expression, or amount of VEGFR-3; and/or
   [2411] a higher activity, expression, or amount of TATI; and/or
   [2412] a higher activity, expression, or amount of MMP-7; and/or
   [2413] a higher activity, expression, or amount of Leptin; and/or
   [2414] a higher activity, expression, or amount of Apo A-I; and/or
   [2415] a higher activity, expression, or amount of ANG-2; and/or
   [2416] a higher activity, expression, or amount of Cystatin-C; and/or
   [2417] a higher activity, expression, or amount of Hepsin; and/or
   [2418] a higher activity, expression, or amount of Apo C-I; and/or
   [2419] a higher activity, expression, or amount of IL-1RI; and/or
   [2420] a higher activity, expression, or amount of Axl; and/or
   [2421] a higher activity, expression, or amount of LDH;
   [2422] in the sample profile as compared with the control profile is indicative of susceptibility to treatment with an agent capable of inhibiting or reversing EMT or a chemotherapeutic agent.
[2423] 111. A method according to any one of statements 101-110, wherein the one or more biomarker comprises HB-EGF,
   [2424] optionally wherein the one or more biomarker comprises at least 1, 2, 3, 4, 5, 6, 7, 8, 9, 10, or more further biomarkers selected from: HB-EGF, AFP, CgA, Nr-CAM, KIM-1, CD40, LAP TGF-b1, EGF, IL-2 receptor alpha, hCG, TARC, CD40-L, VEGFR-3, TATI, MMP-7, Leptin, Apo A-I, Periostin, ANG-2, Cystatin-C, Hepsin Apo C-I, IL-1RI, Eotaxin-2, MPO, FRTN, Axl, and/or LDH.
[2425] 112. A method according to any one of statements 101-110, wherein the one or more biomarker comprises AFP
   [2426] optionally wherein the one or more biomarker comprises at least 1, 2, 3, 4, 5, 6, 7, 8, 9, 10, or more further biomarkers selected from: HB-EGF, CgA, Nr-CAM, KIM-1, CD40, LAP TGF-b1, EGF, IL-2 receptor alpha, hCG, TARO, CD40-L, VEGFR-3, TATI, MMP-7, Leptin, Apo A-I, Periostin, ANG-2, Cystatin-C, Hepsin Apo C-I, IL-1RI, Eotaxin-2, MPO, FRTN, Axl, and/or LDH.
[2427] 113. A method according to any one of statements 101-110, wherein the one or more biomarker comprises CgA,
   [2428] optionally wherein the one or more biomarker comprises at least 1, 2, 3, 4, 5, 6, 7, 8, 9, 10, or more further biomarkers selected from: HB-EGF, AFP, Nr-CAM, KIM-1, CD40, LAP TGF-b1, EGF, IL-2 receptor alpha, hCG, TARC, CD40-L, VEGFR-3, TATI, MMP-7, Leptin, Apo A-I, Periostin, ANG-2, Cystatin-C, Hepsin Apo C-I, IL-1RI, Eotaxin-2, MPO, FRTN, Axl, and/or LDH.
[2429] 114. A method according to any one of statements 101-110, wherein the one or more biomarker comprises Nr-CAM,
   [2430] optionally wherein the one or more biomarker comprises at least 1, 2, 3, 4, 5, 6, 7, 8, 9, 10, or more further biomarkers selected from: HB-EGF, AFP, CgA, KIM-1, CD40, LAP TGF-b1, EGF, IL-2 receptor alpha, hCG, TARC, CD40-L, VEGFR-3, TATI, MMP-7, Leptin, Apo A-I, Periostin, ANG-2, Cystatin-C, Hepsin Apo C-I, IL-1RI, Eotaxin-2, MPO, FRTN, Axl, and/or LDH.
[2431] 115. A method according to any one of statements 101-110, wherein the one or more biomarker comprises KIM-1,
   [2432] optionally wherein the one or more biomarker comprises at least 1, 2, 3, 4, 5, 6, 7, 8, 9, 10, or more further biomarkers selected from: HB-EGF, AFP, CgA, Nr-CAM, CD40, LAP TGF-b1, EGF, IL-2 receptor alpha, hCG, TARC, CD40-L, VEGFR-3, TATI, MMP-7, Leptin, Apo A-I, Periostin, ANG-2, Cystatin-C, Hepsin Apo C-I, IL-1RI, Eotaxin-2, MPO, FRTN, Axl, and/or LDH.
[2433] 116. A method according to any one of statements 101-110, wherein the one or more biomarker comprises CD40,
   [2434] optionally wherein the one or more biomarker comprises at least 1, 2, 3, 4, 5, 6, 7, 8, 9, 10, or more further biomarkers selected from: HB-EGF, AFP, CgA, Nr-CAM, KIM-1, LAP TGF-b1, EGF, IL-2 receptor alpha, hCG, TARC, CD40-L, VEGFR-3, TATI, MMP-7, Leptin, Apo A-I, Periostin, ANG-2, Cystatin-C, Hepsin Apo C-I, IL-1RI, Eotaxin-2, MPO, FRTN, Axl, and/or LDH.
[2435] 117. A method according to any one of statements 101-110, wherein the one or more biomarker comprises LAP TGF-b1,
   [2436] optionally wherein the one or more biomarker comprises at least 1, 2, 3, 4, 5, 6, 7, 8, 9, 10, or more further biomarkers selected from: HB-EGF, AFP, CgA, Nr-CAM, KIM-1, CD40, EGF, IL-2 receptor alpha, hCG, TARC, CD40-L, VEGFR-3, TATI, MMP-7, Leptin, Apo A-I, Periostin, ANG-2, Cystatin-C, Hepsin Apo C-I, IL-1RI, Eotaxin-2, MPO, FRTN, Axl, and/or LDH.
[2437] 118. A method according to any one of statements 101-110, wherein the one or more biomarker comprises EGF,
   [2438] optionally wherein the one or more biomarker comprises at least 1, 2, 3, 4, 5, 6, 7, 8, 9, 10, or more further biomarkers selected from: HB-EGF, AFP, CgA, Nr-CAM, KIM-1, CD40, LAP TGF-b1, IL-2 receptor alpha, hCG, TARC, CD40-L, VEGFR-3, TATI, MMP-7, Leptin, Apo A-I, Periostin, ANG-2, Cystatin-C, Hepsin Apo C-I, IL-1RI, Eotaxin-2, MPO, FRTN, Axl, and/or LDH.
[2439] 119. A method according to any one of statements 101-110, wherein the one or more biomarker comprises IL-2ra,
   [2440] optionally wherein the one or more biomarker comprises at least 1, 2, 3, 4, 5, 6, 7, 8, 9, 10, or more further biomarkers selected from: HB-EGF, AFP, CgA, Nr-CAM, KIM-1, CD40, LAP TGF-b1, EGF, hCG, TARO, CD40-L, VEGFR-3, TATI, MMP-7, Leptin, Apo A-I, Periostin, ANG-2, Cystatin-C, Hepsin Apo C-I, IL-1RI, Eotaxin-2, MPO, FRTN, Axl, and/or LDH.
[2441] 120. A method according to any one of statements 101-110, wherein the one or more biomarker comprises hCG,
   [2442] optionally wherein the one or more biomarker comprises at least 1, 2, 3, 4, 5, 6, 7, 8, 9, 10, or more further biomarkers selected from: HB-EGF, AFP, CgA, Nr-CAM, KIM-1, CD40, LAP TGF-b1, EGF, IL-2 receptor alpha, TARC, CD40-L, VEGFR-3, TATI, MMP-7, Leptin, Apo A-I, Periostin, ANG-2, Cystatin-C, Hepsin Apo C-I, IL-1RI, Eotaxin-2, MPO, FRTN, Axl, and/or LDH.
[2443] 121. A method according to any one of statements 101-110, wherein the one or more biomarker comprises TARC,
   [2444] optionally wherein the one or more biomarker comprises at least 1, 2, 3, 4, 5, 6, 7, 8, 9, 10, or more further biomarkers selected from: HB-EGF, AFP, CgA, Nr-CAM, KIM-1, CD40, LAP TGF-b1, EGF, IL-2 receptor alpha, hCG, CD40-L, VEGFR-3, TATI, MMP-7, Leptin, Apo A-I, Periostin, ANG-2, Cystatin-C, Hepsin Apo C-I, IL-1RI, Eotaxin-2, MPO, FRTN, Axl, and/or LDH.
[2445] 122. A method according to any one of statements 101-110, wherein the one or more biomarker comprises CD40-L,
   [2446] optionally wherein the one or more biomarker comprises at least 1, 2, 3, 4, 5, 6, 7, 8, 9, 10, or more further biomarkers selected from: HB-EGF, AFP, CgA, Nr-CAM, KIM-1, CD40, LAP TGF-b1, EGF, IL-2 receptor alpha, hCG, TARC, VEGFR-3, TATI, MMP-7, Leptin, Apo A-I, Periostin, ANG-2, Cystatin-C, Hepsin Apo C-I, IL-1RI, Eotaxin-2, MPO, FRTN, Axl, and/or LDH.
[2447] 123. A method according to any one of statements 101-110, wherein the one or more biomarker comprises VEGFR-3,
   [2448] optionally wherein the one or more biomarker comprises at least 1, 2, 3, 4, 5, 6, 7, 8, 9, 10, or more further biomarkers selected from: HB-EGF, AFP, CgA, Nr-CAM, KIM-1, CD40, LAP TGF-b1, EGF, IL-2 receptor alpha, hCG, TARC, CD40-L, TATI, MMP-7, Leptin, Apo A-I, Periostin, ANG-2, Cystatin-C, Hepsin Apo C-I, IL-1RI, Eotaxin-2, MPO, FRTN, Axl, and/or LDH.
[2449] 124. A method according to any one of statements 101-110, wherein the one or more biomarker comprises TATI,
   [2450] optionally wherein the one or more biomarker comprises at least 1, 2, 3, 4, 5, 6, 7, 8, 9, 10, or more further biomarkers selected from: HB-EGF, AFP, CgA, Nr-CAM, KIM-1, CD40, LAP TGF-b1, EGF, IL-2 receptor alpha, hCG, TARC, CD40-L, VEGFR-3, MMP-7, Leptin, Apo A-I, Periostin, ANG-2, Cystatin-C, Hepsin Apo C-I, IL-1RI, Eotaxin-2, MPO, FRTN, Axl, and/or LDH.
[2451] 125. A method according to any one of statements 101-110, wherein the one or more biomarker comprises MMP-7,
   [2452] optionally wherein the one or more biomarker comprises at least 1, 2, 3, 4, 5, 6, 7, 8, 9, 10, or more further biomarkers selected from: HB-EGF, AFP, CgA, Nr-CAM, KIM-1, CD40, LAP TGF-b1, EGF, IL-2 receptor alpha, hCG, TARC, CD40-L, VEGFR-3, TATI, Leptin, Apo A-I, Periostin, ANG-2, Cystatin-C, Hepsin Apo C-I, IL-1RI, Eotaxin-2, MPO, FRTN, Axl, and/or LDH.
[2453] 126. A method according to any one of statements 101-110, wherein the one or more biomarker comprises Leptin,
   [2454] optionally wherein the one or more biomarker comprises at least 1, 2, 3, 4, 5, 6, 7, 8, 9, 10, or more further biomarkers selected from: HB-EGF, AFP, CgA, Nr-CAM, KIM-1, CD40, LAP TGF-b1, EGF, IL-2 receptor alpha, hCG, TARC, CD40-L, VEGFR-3, TATI, MMP-7, Apo A-I, Periostin, ANG-2, Cystatin-C, Hepsin Apo C-I, IL-1RI, Eotaxin-2, MPO, FRTN, Axl, and/or LDH.
[2455] 127. A method according to any one of statements 101-110, wherein the one or more biomarker comprises Apo A-I,
   [2456] optionally wherein the one or more biomarker comprises at least 1, 2, 3, 4, 5, 6, 7, 8, 9, 10, or more further biomarkers selected from: HB-EGF, AFP, CgA, Nr-CAM, KIM-1, CD40, LAP TGF-b1, EGF, IL-2 receptor alpha, hCG, TARO, CD40-L, VEGFR-3, TATI, MMP-7, Leptin, Periostin, ANG-2, Cystatin-C, Hepsin Apo C-I, IL-1RI, Eotaxin-2, MPO, FRTN, Axl, and/or LDH.
[2457] 128. A method according to any one of statements 101-110, wherein the one or more biomarker comprises Periostin,
   [2458] optionally wherein the one or more biomarker comprises at least 1, 2, 3, 4, 5, 6, 7, 8, 9, 10, or more further biomarkers selected from: HB-EGF, AFP, CgA, Nr-CAM, KIM-1, CD40, LAP TGF-b1, EGF, IL-2 receptor alpha, hCG, TARC, CD40-L, VEGFR-3, TATI, MMP-7, Leptin, Apo A-I, ANG-2, Cystatin-C, Hepsin Apo C-I, IL-1RI, Eotaxin-2, MPO, FRTN, Axl, and/or LDH.
[2459] 129. A method according to any one of statements 101-110, wherein the one or more biomarker comprises ANG-2,
   [2460] optionally wherein the one or more biomarker comprises at least 1, 2, 3, 4, 5, 6, 7, 8, 9, 10, or more further biomarkers selected from: HB-EGF, AFP, CgA, Nr-CAM, KIM-1, CD40, LAP TGF-b1, EGF, IL-2 receptor alpha, hCG, TARC, CD40-L, VEGFR-3, TATI, MMP-7, Leptin, Apo A-I, Periostin, Cystatin-C, Hepsin Apo C-I, IL-1RI, Eotaxin-2, MPO, FRTN, Axl, and/or LDH.
[2461] 130. A method according to any one of statements 101-110, wherein the one or more biomarker comprises Cystain-C,
   [2462] optionally wherein the one or more biomarker comprises at least 1, 2, 3, 4, 5, 6, 7, 8, 9, 10, or more further biomarkers selected from: HB-EGF, AFP, CgA, Nr-CAM, KIM-1, CD40, LAP TGF-b1, EGF, IL-2 receptor alpha, hCG, TARC, CD40-L, VEGFR-3, TATI, MMP-7, Leptin, Apo A-I, Periostin, ANG-2, Hepsin Apo C-I, IL-1RI, Eotaxin-2, MPO, FRTN, Axl, and/or LDH.
[2463] 131. A method according to any one of statements 101-110, wherein the one or more biomarker comprises Hepsin,
   [2464] optionally wherein the one or more biomarker comprises at least 1, 2, 3, 4, 5, 6, 7, 8, 9, 10, or more further biomarkers selected from: HB-EGF, AFP, CgA, Nr-CAM, KIM-1, CD40, LAP TGF-b1, EGF, IL-2 receptor alpha, hCG, TARC, CD40-L, VEGFR-3, TATI, MMP-7, Leptin, Apo A-I, Periostin, ANG-2, Cystatin-C, Apo C-I, IL-1RI, Eotaxin-2, MPO, FRTN, Axl, and/or LDH.
[2465] 132. A method according to any one of statements 101-110, wherein the one or more biomarker comprises Apo C-I,
   [2466] optionally wherein the one or more biomarker comprises at least 1, 2, 3, 4, 5, 6, 7, 8, 9, 10, or more further biomarkers selected from: HB-EGF, AFP, CgA, Nr-CAM, KIM-1, CD40, LAP TGF-b1, EGF, IL-2 receptor alpha, hCG, TARC, CD40-L, VEGFR-3, TATI, MMP-7, Leptin, Apo A-I, Periostin, ANG-2, Cystatin-C, Hepsin, IL-1RI, Eotaxin-2, MPO, FRTN, Axl, and/or LDH.
[2467] 133. A method according to any one of statements 101-110, wherein the one or more biomarker comprises IL-1RI,
   [2468] optionally wherein the one or more biomarker comprises at least 1, 2, 3, 4, 5, 6, 7, 8, 9, 10, or more further biomarkers selected from: HB-EGF, AFP, CgA, Nr-CAM, KIM-1, CD40, LAP TGF-b1, EGF, IL-2 receptor alpha, hCG, TARC, CD40-L, VEGFR-3, TATI, MMP-7, Leptin, Apo A-I, Periostin, ANG-2, Cystatin-C, Hepsin Apo C-I, Eotaxin-2, MPO, FRTN, Axl, and/or LDH.
[2469] 134. A method according to any one of statements 101-110, wherein the one or more biomarker comprises HB-EGF,
   [2470] optionally wherein the one or more biomarker comprises at least 1, 2, 3, 4, 5, 6, 7, 8, 9, 10, or more further biomarkers selected from: HB-EGF, AFP, CgA, Nr-CAM, KIM-1, CD40, LAP TGF-b1, EGF, IL-2 receptor alpha, hCG, TARO, CD40-L, VEGFR-3, TATI, MMP-7, Leptin, Apo A-I, Periostin, ANG-2, Cystatin-C, Hepsin Apo C-I, IL-1RI, Eotaxin-2, MPO, FRTN, Axl, and/or LDH.
[2471] 135. A method according to any one of statements 101-110, wherein the one or more biomarker comprises Eotaxin-2,
   [2472] optionally wherein the one or more biomarker comprises at least 1, 2, 3, 4, 5, 6, 7, 8, 9, 10, or more further biomarkers selected from: HB-EGF, AFP, CgA, Nr-CAM, KIM-1, CD40, LAP TGF-b1, EGF, IL-2 receptor alpha, hCG, TARC, CD40-L, VEGFR-3, TATI, MMP-7, Leptin, Apo A-I, Periostin, ANG-2, Cystatin-C, Hepsin Apo C-I, IL-1RI, MPO, FRTN, Axl, and/or LDH.
[2473] 136. A method according to any one of statements 101-110, wherein the one or more biomarker comprises MPO,
   [2474] optionally wherein the one or more biomarker comprises at least 1, 2, 3, 4, 5, 6, 7, 8, 9, 10, or more further biomarkers selected from: HB-EGF, AFP, CgA, Nr-CAM, KIM-1, CD40, LAP TGF-b1, EGF, IL-2 receptor alpha, hCG, TARC, CD40-L, VEGFR-3, TATI, MMP-7, Leptin, Apo A-I, Periostin, ANG-2, Cystatin-C, Hepsin Apo C-I, IL-1RI, Eotaxin-2, FRTN, Axl, and/or LDH.
[2475] 137. A method according to any one of statements 101-110, wherein the one or more biomarker comprises FRTN,
   [2476] optionally wherein the one or more biomarker comprises at least 1, 2, 3, 4, 5, 6, 7, 8, 9, 10, or more further biomarkers selected from: HB-EGF, AFP, CgA, Nr-CAM, KIM-1, CD40, LAP TGF-b1, EGF, IL-2 receptor alpha, hCG, TARC, CD40-L, VEGFR-3, TATI, MMP-7, Leptin, Apo A-I, Periostin, ANG-2, Cystatin-C, Hepsin Apo C-I, IL-1RI, Eotaxin-2, MPO, Axl, and/or LDH.
[2477] 138. A method according to any one of statements 101-110, wherein the one or more biomarker comprises Axl,
   [2478] optionally wherein the one or more biomarker comprises at least 1, 2, 3, 4, 5, 6, 7, 8, 9, 10, or more further biomarkers selected from: HB-EGF, AFP, CgA, Nr-CAM, KIM-1, CD40, LAP TGF-b1, EGF, IL-2 receptor alpha, hCG, TARC, CD40-L, VEGFR-3, TATI, MMP-7, Leptin, Apo A-I, Periostin, ANG-2, Cystatin-C, Hepsin Apo C-I, IL-1RI, Eotaxin-2, MPO, FRTN, and/or LDH.
[2479] 139. A method according to any one of statements 101-110, wherein the one or more biomarker comprises LDH,
   [2480] optionally wherein the one or more biomarker comprises at least 1, 2, 3, 4, 5, 6, 7, 8, 9, 10, or more further biomarkers selected from: HB-EGF, AFP, CgA, Nr-CAM, KIM-1, CD40, LAP TGF-b1, EGF, TATI, IL-2 receptor alpha, hCG, TARC, CD40-L, VEGFR-3, MMP-7, Leptin, Apo A-I, Periostin, ANG-2, Cystatin-C, Hepsin Apo C-I, IL-1RI, Eotaxin-2, MPO, FRTN, and/or Axl.
[2481] 140. A method according to any one of statements 111-139, wherein the one or more biomarker further comprises AFP.
[2482] 141. A method according to any one of statements 111-140, wherein the one or more biomarker further comprises CgA.
[2483] 142. A method according to any one of statements 111-141, wherein the one or more biomarker further comprises Nr-CAM.
[2484] 143. A method according to any one of statements 111-142, wherein the one or more biomarker further comprises KIM-1.
[2485] 144. A method according to any one of statements 111-143, wherein the one or more biomarker further comprises CD40.
[2486] 145. A method according to any one of statements 111-144, wherein the one or more biomarker further comprises LAP-TGF-b1.
[2487] 146. A method according to any one of statements 111-145, wherein the one or more biomarker further comprises EGF.
[2488] 147. A method according to any one of statements 111-146, wherein the one or more biomarker further comprises TATI.
[2489] 148. A method according to any one of statements 111-147, wherein the one or more biomarker further comprises Axl.
[2490] 149. A method according to any one of statements 111-148, wherein the one or more biomarker further comprises LDH.
[2491] 150. A method according to any one of statements 111-149, wherein the one or more biomarker further comprises IL-2ra.
[2492] 151. A method according to any one of statements 111-150, wherein the one or more biomarker further comprises hCG.
[2493] 152. A method according to any one of statements 111-151, wherein the one or more biomarker further comprises TARO.
[2494] 153. A method according to any one of statements 111-152, wherein the one or more biomarker further comprises CD40-L.
[2495] 154. A method according to any one of statements 111-153, wherein the one or more biomarker further comprises VEGFR-3.
[2496] 155. A method according to any one of statements 111-154, wherein the one or more biomarker further comprises MMP-7.
[2497] 156. A method according to any one of statements 111-155, wherein the one or more biomarker further comprises Leptin.
[2498] 157. A method according to any one of statements 111-156, wherein the one or more biomarker further comprises Apo A-I.
[2499] 158. A method according to any one of statements 111-157, wherein the one or more biomarker further comprises Periostin.
[2500] 159. A method according to any one of statements 111-158, wherein the one or more biomarker further comprises ANG-2.
[2501] 160. A method according to any one of statements 111-159, wherein the one or more biomarker further comprises Cystatin-C.
[2502] 161. A method according to any one of statements 111-160, wherein the one or more biomarker further comprises Hepsin.
[2503] 162. A method according to any one of statements 111-161, wherein the one or more biomarker further comprises Apo C-I.
[2504] 163. A method according to any one of statements 111-162, wherein the one or more biomarker further comprises IL-1RI.
[2505] 164. A method according to any one of statements 111-163, wherein the one or more biomarker further comprises Eotaxin-2.
[2506] 165. A method according to any one of statements 111-164, wherein the one or more biomarker further comprises MPO.
[2507] 166. A method according to any one of statements 111-165, wherein the one or more biomarker further comprises FRTN.
[2508] 167. A method according to any one of statements 101-166, wherein:
   [2509] the Axl biomarker comprises an amino acid sequence having at least 70%, 80%, 90%, 95%, 99% or 100% sequence identity with the full-length of the amino acid sequence disclosed at UniProt accession no: P30530-1 or P30530-2 (entry version 196) or a fragment thereof;
   [2510] the Alpha-Fetoprotein (AFP) biomarker comprises an amino acid sequence having at least 70%, 80%, 90%, 95%, 99% or 100% sequence identity with the full-length of the amino acid sequence disclosed at UniProt accession no: P02771-1 (entry version 192) or a fragment thereof;
   [2511] the Heparin-Binding EGF-Like Growth Factor (HB-EGF) biomarker comprises an amino acid sequence having at least 70%, 80%, 90%, 95%, 99% or 100% sequence identity with the full-length of the amino acid sequence disclosed at UniProt accession no: Q99075 (entry version 171) or a fragment thereof;
   [2512] the Neuronal Cell Adhesion Molecule (Nr-CAM) biomarker comprises an amino acid sequence having at least 70%, 80%, 90%, 95%, 99% or 100% sequence identity with the full-length of the amino acid sequence disclosed at UniProt accession no: Q92823-1, Q92823-2, Q92823-3, Q92823-4, Q92823-5, or Q92823-6 (entry version 172) or a fragment thereof;
   [2513] the Kidney Injury Molecule-1 (KIM-1) biomarker comprises an amino acid sequence having at least 70%, 80%, 90%, 95%, 99% or 100% sequence identity with the full-length of the amino acid sequence disclosed at UniProt accession no: Q96D42-1 (entry version 141) or a fragment thereof;
   [2514] the CD 40 antigen (CD40) comprises an amino acid sequence having at least 70%, 80%, 90%, 95%, 99% or 100% sequence identity with the full-length of the amino acid sequence disclosed at UniProt accession no: P25942-1 or P25942-2 (entry version 221) or a fragment thereof;
   [2515] the Chromogranin-A (CgA) biomarker comprises an amino acid sequence having at least 70%, 80%, 90%, 95%, 99% or 100% sequence identity with the full-length of the amino acid sequence disclosed at UniProt accession no: P10645-1 (entry version 200) or a fragment thereof;
   [2516] the Interleukin-2 receptor alpha (IL-2 receptor alpha) biomarker comprises an amino acid sequence having at least 70%, 80%, 90%, 95%, 99% or 100% sequence identity with the full-length of the amino acid sequence disclosed at UniProt accession no: P01589-1 (entry version 200) or a fragment thereof;
   [2517] the Human Chorionic Gonadotropin beta (hCG) comprises an amino acid sequence having at least 70%, 80%, 90%, 95%, 99% or 100% sequence identity with the full-length of the amino acid sequence disclosed at UniProt accession no: PODN86-1 or PODN86-2 (entry version 26) or a fragment thereof;
   [2518] the Latency-Associated Peptide of Transforming Growth Factor beta 1 (LAP TGF-b1) biomarker comprises an amino acid sequence having at least 70%, 80%, 90%, 95%, 99% or 100% sequence identity with the full-length of the amino acid sequence disclosed at UniProt accession no: P01137 (entry version 235) or a fragment thereof;
   [2519] the Thymus and activation-regulated chemokine (TARO) biomarker comprises an amino acid sequence having at least 70%, 80%, 90%, 95%, 99% or 100% sequence identity with the full-length of the amino acid sequence disclosed at UniProt accession no: Q92583-1 (entry version 163) or a fragment thereof;
   [2520] the CD40 Ligand (CD40-L) biomarker comprises an amino acid sequence having at least 70%, 80%, 90%, 95%, 99% or 100% sequence identity with the full-length of the amino acid sequence disclosed at UniProt accession no: P29965 (entry version 199) or a fragment thereof;
   [2521] the Epidermal Growth Factor (EGF) biomarker comprises an amino acid sequence having at least 70%, 80%, 90%, 95%, 99% or 100% sequence identity with the full-length of the amino acid sequence disclosed at UniProt accession no: P01133-1, P01133-2, or P01133-3 (entry version 204) or a fragment thereof;
   [2522] the Vascular endothelial growth factor receptor 3 (VEGFR-3) biomarker comprises an amino acid sequence having at least 70%, 80%, 90%, 95%, 99% or 100% sequence identity with the full-length of the amino acid sequence disclosed at UniProt accession no: P35916-1, P35916-2, or P35916-3 (entry version 206) or a fragment thereof;
   [2523] the Pancreatic secretory trypsin inhibitor (TATI) biomarker comprises an amino acid sequence having at least 70%, 80%, 90%, 95%, 99% or 100% sequence identity with the full-length of the amino acid sequence disclosed at UniProt accession no: P00995-1 (entry version 193) or a fragment thereof;
   [2524] the Matrix Metalloproteinase-7 (MMP-7) biomarker comprises an amino acid sequence having at least 70%, 80%, 90%, 95%, 99% or 100% sequence identity with the full-length of the amino acid sequence disclosed at UniProt accession no: P09237-1 (entry version 197) or a fragment thereof;
   [2525] the Leptin biomarker comprises an amino acid sequence having at least 70%, 80%, 90%, 95%, 99% or 100% sequence identity with the full-length of the amino acid sequence disclosed at UniProt accession no: P41159 (entry version 176) or a fragment thereof;
   [2526] the Apolipoprotein A-I (Apo A-I) biomarker comprises an amino acid sequence having at least 70%, 80%, 90%, 95%, 99% or 100% sequence identity with the full-length of the amino acid sequence disclosed at UniProt accession no: P02647-1 (entry version 241) or a fragment thereof;
   [2527] the Periostin biomarker comprises an amino acid sequence having at least 70%, 80%, 90%, 95%, 99% or 100% sequence identity with the full-length of the amino acid sequence disclosed at UniProt accession no: Q15063-1, Q15063-2, Q15063-3, Q15063-4, Q15063-5, Q15063-6, Q15063-7 (entry version 160) or a fragment thereof;
   [2528] the Angiopoietin-2 (ANG-2) biomarker comprises an amino acid sequence having at least 70%, 80%, 90%, 95%, 99% or 100% sequence identity with the full-length of the amino acid sequence disclosed at UniProt accession no: 015123-1, 015123-2, or 015123-3 (entry version 163) or a fragment thereof;
   [2529] the Cystatin-C biomarker comprises an amino acid sequence having at least 70%, 80%, 90%, 95%, 99% or 100% sequence identity with the full-length of the amino acid sequence disclosed at UniProt accession no: P01034-1 (entry version 213) or a fragment thereof;
   [2530] the Hepsin biomarker comprises an amino acid sequence having at least 70%, 80%, 90%, 95%, 99% or 100% sequence identity with the full-length of the amino acid sequence disclosed at UniProt accession no: P05981-1 (entry version 183) or a fragment thereof;
   [2531] the Apolipoprotein C-I (Apo C-I) biomarker comprises an amino acid sequence having at least 70%, 80%, 90%, 95%, 99% or 100% sequence identity with the full-length of the amino acid sequence disclosed at UniProt accession no: P02654 (entry version 175) or a fragment thereof;
   [2532] the Interleukin-1 receptor type 1 (IL-1RI) biomarker comprises an amino acid sequence having at least 70%, 80%, 90%, 95%, 99% or 100% sequence identity with the full-length of the amino acid sequence disclosed at UniProt accession no: P14778-1 (entry version 215) or a fragment thereof;
   [2533] the Eotaxin-2 biomarker comprises an amino acid sequence having at least 70%, 80%, 90%, 95%, 99% or 100% sequence identity with the full-length of the amino acid sequence disclosed at UniProt accession no: 000175-1 (entry version 162) or a fragment thereof;
   [2534] the Myeloperoxidase (MPO) biomarker comprises an amino acid sequence having at least 70%, 80%, 90%, 95%, 99% or 100% sequence identity with the full-length of the amino acid sequence disclosed at UniProt accession no: P05164-1, P05164-2, or P05164-3 (entry version 217) or a fragment thereof;
   [2535] the Ferritin (FRTN) biomarker comprises an amino acid sequence having at least 70%, 80%, 90%, 95%, 99% or 100% sequence identity with the full-length of the amino acid sequence disclosed at UniProt accession no: P02794 (entry version 213) or a fragment thereof;
   [2536] the Lactate Dehydrogenase (LDH) biomarker comprises an amino acid sequence having at least 70%, 80%, 90%, 95%, 99% or 100% sequence identity with the full-length of the amino acid sequence disclosed at UniProt accession no: P00338-1, P00338-2, P00338-3, P00338-4, or P00338-5 (entry version 224) or a fragment thereof; and/or
   [2537] the Lactate Dehydrogenase (LDH) biomarker comprises an amino acid sequence having at least 70%, 80%, 90%, 95%, 99% or 100% sequence identity with the full-length of the amino acid sequence disclosed at UniProt accession no: P07195-1 (entry version 218) or a fragment thereof.
   [2538] or a nucleic acid (either DNA or RNA) having at least 70%, 80%, 90%, 95%, 99% or 100% sequence identity with the full-length nucleic acid sequence encoding said amino acid sequences.
[2539] 168. A method according to any one of statement 101-167, wherein the method comprises determining the amount of at least 2, 3, 4, 5, 6, 7, 8, 9, 10, 11, 12, 13, 14, 15, 20 of said biomarkers in the subject, or sample derived from the subject.
[2540] 169. A method according to any one of statements 104-168, wherein assessing the activity, expression, or amount of one or more biomarker in the subject, or in a sample derived from the subject, comprises:
   [2541] contacting a sample, or an extract from the sample, with at least 1, 2, 3, 4, 5, 6, 7, 8, 9, 10 or more reagents for detecting the activity, expression, or amount of one or more biomarkers, each of which is selective for a particular biomarker; and
   [2542] detecting and/or quantifying said reagents for detecting.
[2543] 170. A method according to statement 169, wherein assessing the expression or amount of one or more biomarker in the subject, or in a sample derived from the subject, comprises:
   [2544] contacting a sample, or an extract from the sample, with at least 1, 2, 3, 4, 5, 6, 7, 8, 9, 10 or more specific binding members, each of which selectively binds to a respective biomarker protein or mRNA; and
   [2545] detecting and/or quantifying formation of complex formed by said specific binding member and said biomarker protein or mRNA.
[2546] 171. A method according to statement 170 wherein the specific binding member comprises an antibody molecule or binding fragment thereof.
[2547] 172. A method according to statement 170 or 171, wherein detecting formation of a complex formed by the specific binding member and the biomarker protein or mRNA is carried out by use of a technique selected from: Western blot; enzyme-linked immunosorbent assay (ELISA); radioimmunoassay (RIA); competitive enzyme immunoassay; double antibody sandwich ELISA (DAS-ELISA); liquid immunoarray technology; immunocytochemistry; immunohistochemistry; antibody microarray detection; precipitation of colloidal gold; affinity chromatography; ligand binding assay; and lectin binding assay.
[2548] 173. A method according to any one of statements 170-172 wherein the expression or amount of the one or more biomarker is determined as the absolute amount of the respective biomarker protein or mRNA in the sample.
[2549] 174. A method according to any one of statements 170-172 wherein the expression or amount of the one or more biomarker is determined as a relative amount of the respective biomarker protein or mRNA in the sample,
   [2550] optionally wherein the relative amount is determined relative to a reference protein or mRNA in the sample, the expression of which is not altered by melanoma.
[2551] 175. A method according to any one of statements 101-174, wherein the cancer-related outcome is susceptibility to treatment with an agent capable of inhibiting or reversing EMT or a chemotherapeutic agent.
[2552] 176. A method according to statement 174, wherein the agent capable of inhibiting or reversing EMT or chemotherapeutic agent is an Axl inhibitor, Akt3 inhibitor, Slfn11 inhibitor, or PHGDH inhibitor.
[2553] 177. A method according to statement 176, wherein the agent capable of inhibiting or reversing EMT or chemotherapeutic agent is an Axl inhibitor.
[2554] 178. A method according to statement 177, wherein the Axl inhibitor is BGB324/R428/bemcentinib, cabozantinib, TP-0903, foretinib, merestinib, bosutinib, gilteritinib, crizotinib, amuvatinib, sunitinib, sitravatinib, LDC1267, UNC2025, or an anti-Axl antibody described in WO2015/193428, WO2015/193430, WO2016/097370, or WO2016/166296.
[2555] 179. A method according to statement 178, wherein the Axl inhibitor is BGB324/R428/bemcentinib.
[2556] 180. A method according to statement 178, wherein the Axl inhibitor is an anti-Axl antibody described in WO2015/193428, WO2015/193430, WO2016/097370, or WO2016/166296.
[2557] 181. A method according to statement 176, wherein the agent capable of inhibiting or reversing EMT or chemotherapeutic agent is an Akt3 inhibitor.
[2558] 182. A method according to statement 181, wherein the Akt3 inhibitor is an Akt3 inhibitor disclosed in WO2016/102672.
[2559] 183. A method according to any one of statements 175-182, wherein the agent capable of inhibiting or reversing EMT is administered as a single agent.
[2560] 184. A method according to any one of statements 175-182, wherein the agent capable of inhibiting or reversing EMT is administered in combination with a further cancer treatment.
[2561] 185. A method according to statement 184, wherein the further cancer treatment is selected from:
   [2562] (i) alkylating agents, including alkyl sulfonates such as busulfan;
   [2563] (ii) nitrogen mustards such as chlorambucil, cyclophosphamide, estramustine, ifosfamide, mechlorethamine, melphalan, and uramustine;
   [2564] (iii) ethyleneimine derivatives such as thiotepa;
   [2565] (iv) nitrosoureas such as carmustine, lomustine, and streptozocin;
   [2566] (v) triazenes such as dacarbazine, procarbazine, and temozolamide;
   [2567] (vi) platinum compounds such as cisplatin, carboplatin, oxaliplatin, satraplatin, and picoplatin onnaplatin, tetraplatin, sprioplatin, iproplatin, chloro(diethylenediamino)-platinum (II) chloride, dichloro(ethylenediamino)-platinum (II), diamino(2-ethylmalonato)platinum (II), (1,2-diaminocyclohexane)malonatoplatinum (II), (4-carboxyphthalo)-(1,2-diaminocyclohexane)platinum (II), (1,2-diaminocyclohexane)-(isocitrato)platinum (II), and (1,2-diaminocyclohexane)-cis-(pyruvato)platinum (II);
   [2568] (vii) antimetabolites, including antifolates such as methotrexate, permetrexed, raltitrexed, and trimetrexate;
   [2569] (viii) pyrimidine analogues such as azacitidine, capecitabine, cytarabine, edatrexate, floxuridine, fluorouracil, gemcitabine, and troxacitabine;
   [2570] (ix) purine analogues such as cladribine, chlorodeoxyadenosine, clofarabine, fludarabine, mercaptopurine, pentostatin, and thioguanine;
   [2571] (x) natural products, including antitumor antibiotics such as bleomycin, dactinomycin, mithramycin, mitomycin, mitoxantrone, porfiromycin;
   [2572] (xi) anthracyclines such as daunorubicin, doxorubicin, epirubicin, idarubicin, and valrubicin;
   [2573] (xii) mitotic inhibitors such as the vinca alkaloids vinblastine, vinvesir, vincristine, vindesine, and vinorelbine;
   [2574] (xiii) enzymes such as L-asparaginase and PEG-L-asparaginase;
   [2575] (xiv) microtubule polymer stabilizers such as the taxanes paclitaxel and docetaxel;
   [2576] (xv) topoisomerase I inhibitors such as the camptothecins irinotecan and topotecan;
   [2577] (xvi) topoisomerase II inhibitors such as podophyllotoxin, amsacrine, etoposide, teniposide, losoxantrone and actinomycin;
   [2578] (xvii) hormones and hormone antagonists, including
      [2579] androgens such as fluoxymesterone and testolactone;
      [2580] antiandrogens such as bicalutamide, cyproterone, flutamide, and nilutamide;
      [2581] corticosteroids such as dexamethasone and prednisone;
      [2582] aromatase inhibitors such as aminoglutethimide, anastrozole, exemestane, formestane, and letrozole;
      [2583] estrogens such as diethylstilbestrol;
      [2584] antiestrogens such as fulvestrant, raloxifene, tamoxifen, and toremifine;
      [2585] luteinising hormone-releasing hormone (LHRH) agonists and antagonists such as abarelix, buserelin, goserelin, leuprolide, histrelin, desorelin, nafarelin acetate and triptorelin;
      [2586] progestins such as medroxyprogesterone acetate and megestrol acetate; and
      [2587] thyroid hormones such as levothyroxine and liothyronine;
   [2588] (xviii) PKB pathway inhibitors, including perifosine, enzastaurin hydrochloride, and triciribine;
   [2589] (xix) P13K inhibitors such as semaphore and SF1126, and MTOR inhibitors such as rapamycin and analogues;
   [2590] (xx) CDK inhibitors, including seliciclib, alvocidib, and 7-hydroxystaurosporine;
   [2591] (xxi) COX-2 inhibitors, including celecoxib;
   [2592] (xxii) HDAC inhibitiors, including trichostatin A, suberoylanilide hydroxamic acid, and chlamydocin;
   [2593] (xxiii) DNA methylase inhibitors, including temozolomide, and miscellaneous agents, including altretamine, arsenic trioxide, thalidomide, lenalidomide, gallium nitrate, levamisole, mitotane, hydroxyurea, octreotide, procarbazine, suramin, photodynamic compounds such as methoxsalen and sodium porfimer;
   [2594] (xxiv) proteasome inhibitors such as bortezomib;
   [2595] (xxv) molecular targeted therapy agents including: functional therapeutic agents, including gene therapy agents and antisense therapy agents;
   [2596] (xxvi) tyrosine kinase inhibitors such as erlotinib hydrochloride, gefitinib, imatinib mesylate, and semaxanib;
   [2597] (xxvii) Raf inhibitors such as sorafenib, and gene expression modulators such as the retinoids and rexinoids, for example adapalene, bexarotene, trans-retinoic acid, 9-cis-retinoic acid, and N-(4-hydroxyphenyl)retinamide;
   [2598] (xxviii) phenotype-directed therapy agents, including monoclonal antibodies such as pembrolizumab, alemtuzumab, bevacizumab, cetuximab, ibritumomab tiuxetan, rituximab, and trastuzumab, immunotoxins such as gemtuzumab ozogamicin, radioimmunoconjugates such as I-tositumobab;
   [2599] (xxix) cancer vaccines;
   [2600] (xxx) biologic therapy agents including: interferons such as interferon-[alpha]2a and interferon-[alpha]2b, and interleukins such as aldesleukin, denileukin diftitox, and oprelvekin;
   [2601] (xxxi) anticancer therapies involving the use of protective or adjunctive agents, including: cytoprotective agents such as amifostine, and dexrazoxane, phosphonates such as pamidronate and zoledronic acid, and stimulating factors such as epoetin, darbeopetin, filgrastim, PEG-filgrastim, and sargramostim;
   [2602] (xxxii) Axl inhibitors such as 1-(6,7-dihydro-5H-benzo[6,7]cyclohepta[1,2-c]pyridazin-3-yl)-N3-((7-(S)-pyrrolidin-1-yl)-6,7,8,9-tetrahydro-5H-benzo[7]annulene-2-yl)-1H-1,2,4-triazole-3,5-diamine; and/or
   [2603] (xxxiii) further combination chemotherapeutic regimens, such as combinations of carboplatin/paclitaxel, capecitabine/docetaxel, fluorauracil/levamisole, fluorauracil/leucovorin, methotrexate/leucovorin, and trastuzumab/paclitaxel, alone or in further combination with carboplatin.
[2604] 186. A method according to statement 184, wherein the further cancer treatment is a monoclonal antibody such as pembrolizumab, alemtuzumab, bevacizumab, cetuximab, ibritumomab tiuxetan, or rituximab, or is a B-Raf inhibitor such as debrafenib, a MEK inhibitor such as trametinib or a combination therapy of these agents.
[2605] 187. A method according to statement 186, wherein the further cancer treatment is pembrolizumab.
[2606] 188. A method according to statement 186, wherein the further cancer treatment is a combination therapy of debrafenib and trametinib.
[2607] 189. A method according to any one of statements 101-186, wherein the subject is mammalian.
[2608] 190. A method according to statement 189, wherein the subject is human.
[2609] 191. A method according to any one of statements 101-190, wherein the predictive method is performed before the subject receives a treatment or course of treatment for melanoma.
[2610] 192. A method according to any one of statement 101-191, wherein the predictive method is performed during or after a treatment or course of treatment for melanoma.
[2611] 193. A method according to any one of statements 101-190 or 192, wherein the subject has previously been treated with an agent capable of inhibiting or reversing EMT or a chemotherapeutic agent.
[2612] 194. A method according to statement 193, wherein the subject has previously been treated with an agent selected from: a PHGDH inhibitor, a Slfn11 inhibitor, an Axl inhibitor, or an Akt3 inhibitor.
[2613] 195. A method according to any one of statements 193-194 wherein the subject has previously been treated with an agent that is different to the agent capable of inhibiting or reversing EMT or chemotherapeutic agent for which the subject's susceptibility is being predicted.
[2614] 196. A method according to any one of statements 101-191, wherein the subject has not previously been treated with an agent capable of inhibiting or reversing EMT or a chemotherapeutic agent.
[2615] 197. A method according to statement 196, wherein the subject has not previously been treated with an Axl inhibitor.
[2616] 198. A method according to statement 196, wherein the subject has not previously been treated with an Akt3 inhibitor.
[2617] 199. A method according to any one of statements 101-198, wherein the sample is selected from: blood, serum, plasma, tissue biopsy, culture supernatant, or urine.
[2618] 200. A method according to statement 199, wherein the sample is a blood, serum, or plasma sample.
[2619] 201. A method according to statement 200, wherein the sample is a serum sample.
[2620] 202. A method according to any one of statements 104-201, wherein the method further comprises a subsequent step of assessing the activity, expression, or amount of one or more biomarker in the subject, in which a sample profile is obtained after contacting the subject with an agent capable of inhibiting or reversing EMT or a chemotherapeutic agent.
[2621] 203. A method according to statement 103, wherein the sample profile is obtained after contacting the subject with an agent capable of inhibiting or reversing EMT or a chemotherapeutic agent.
[2622] 204. A method according to statement 202 or 203, wherein the control profile is obtained from the same subject prior to contacting said subject with the agent capable of inhibiting or reversing EMT or a chemotherapeutic agent.
[2623] 205. A method according to statement 204, wherein an increase in the activity, expression, or amount of one or more biomarker in the sample profile as compared with the control profile is indicative of higher susceptibility to treatment with an agent capable of inhibiting or reversing EMT or a chemotherapeutic agent.
[2624] 206. A method according to statement 204, wherein a decrease in the activity, expression, or amount of one or more biomarker in the sample profile as compared with the control profile is indicative of higher susceptibility to treatment with an agent capable of inhibiting or reversing EMT or a chemotherapeutic agent.
[2625] 207. A method according to statement 204, wherein an increase in the activity, expression, or amount of one or more biomarker in the sample profile as compared with the control profile is indicative of lower susceptibility to treatment with an agent capable of inhibiting or reversing EMT or a chemotherapeutic agent.
[2626] 208. A method according to statement 204, wherein a decrease in the activity, expression, or amount of one or more biomarker in the sample profile as compared with the control profile is indicative of lower susceptibility to treatment with an agent capable of inhibiting or reversing EMT or a chemotherapeutic agent.
[2627] 209. A method according to statement 205, wherein the one or more biomarker includes at least HB-EGF.
[2628] 210. A method according to statement 205, wherein the one or more biomarker includes at least CgA.
[2629] 211. A method according to statement 205, wherein the one or more biomarker includes at least Nr-CAM.
[2630] 212. A method according to statement 205, wherein the one or more biomarker includes at least KIM-1.
[2631] 213. A method according to statement 205, wherein the one or more biomarker includes at least CD40.
[2632] 214. A method according to statement 205, wherein the one or more biomarker includes at least LAP TGF-b1.
[2633] 215. A method according to statement 205, wherein the one or more biomarker includes at least EGF.
[2634] 216. A method according to statement 205, wherein the one or more biomarker includes at least TATI.
[2635] 217. A method according to statement 205, wherein the one or more biomarker includes at least Axl.
[2636] 218. A method according to statement 205, wherein the one or more biomarker includes at least LDH.
[2637] 219. A method according to any one of statements 202-218, wherein assessing the activity, expression, or amount of one or more biomarker in the subject, or in a sample derived from the subject, comprises:
   [2638] contacting a sample, or an extract from the sample, with at least 1, 2, 3, 4, 5, 6, 7, 8, 9, 10 or more reagents for detecting the activity, expression, or amount of one or more biomarkers, each of which is selective for a particular biomarker; and
   [2639] detecting and/or quantifying said reagents for detecting.
[2640] 220. A method according to statement 219, wherein assessing the expression or amount of one or more biomarker in the subject, or in a sample derived from the subject, comprises:
   [2641] contacting a sample, or an extract from the sample, with at least 1, 2, 3, 4, 5, 6, 7, 8, 9, 10 or more specific binding members, each of which selectively binds to a respective biomarker protein or mRNA; and
   [2642] detecting and/or quantifying formation of a complex formed by said specific binding member and said biomarker protein or mRNA.
[2643] 221. A method according to statement 220, wherein the specific binding member comprises an antibody molecule or binding fragment thereof.
[2644] 222. A method according to statement 220 or 221, wherein detecting formation of a complex formed by the specific binding member and the biomarker protein or mRNA is carried out by use of a technique selected from: Western blot; enzyme-linked immunosorbent assay (ELISA); radioimmunoassay (RIA); competitive enzyme immunoassay; double antibody sandwich ELISA (DAS-ELISA); liquid immunoarray technology; immunocytochemistry; immunohistochemistry; antibody microarray detection; precipitation of colloidal gold; affinity chromatography; ligand binding assay; and lectin binding assay.
[2645] 223. A method according to any one of statements 220-222 wherein the expression or amount of the one or more biomarker is determined as the absolute amount of the respective biomarker protein or mRNA in the sample.
[2646] 224. A method according to any one of statements 220-222 wherein the expression or amount of the one or more biomarker is determined as a relative amount of the respective biomarker protein or mRNA in the sample,
   [2647] optionally wherein the relative amount is determined relative to a reference protein or mRNA in the sample, the expression of which is not altered by melanoma.
[2648] 225. A method according to any one of statements 203-224, wherein the agent capable of inhibiting or reversing EMT or chemotherapeutic agent is an Axl inhibitor, Akt3 inhibitor, Slfn11 inhibitor, or PHGDH inhibitor.
[2649] 226. A method according to statement 225, wherein the agent capable of inhibiting or reversing EMT or chemotherapeutic agent is an Axl inhibitor.
[2650] 227. A method according to statement 226, wherein the Axl inhibitor is BGB324/R428/bemcentinib, cabozantinib, TP-0903, foretinib, merestinib, bosutinib, gilteritinib, crizotinib, amuvatinib, sunitinib, sitravatinib, LDC1267, UNC2025, or an anti-Axl antibody described in WO2015/193428, WO2015/193430, WO2016/097370, or WO2016/166296.
[2651] 228. A method according to statement 227, wherein the Axl inhibitor is BGB324/R428/bemcentinib.
[2652] 229. A method according to statement 227, wherein the Axl inhibitor is an anti-Axl antibody described in WO2015/193428, WO2015/193430, WO2016/097370, or WO2016/166296.
[2653] 230. A method according to statement 225, wherein the agent capable of inhibiting or reversing EMT or chemotherapeutic agent is an Akt3 inhibitor.
[2654] 231. A method according to statement 230, wherein the Akt3 inhibitor is an Akt3 inhibitor disclosed in WO2016/102672.
[2655] 232. A method according to any one of statements 225-231, wherein the agent capable of inhibiting or reversing EMT is administered as a single agent.
[2656] 233. A method according to any one of statements 225-231, wherein the agent capable of inhibiting or reversing EMT is administered in combination with a further cancer treatment.
[2657] 234. A method according to statement 233, wherein the further cancer treatment is selected from the further cancer treatments listed in statement 185.
[2658] 235. A method according to statement 233, wherein the further cancer treatment is a monoclonal antibody such as pembrolizumab, alemtuzumab, bevacizumab, cetuximab, ibritumomab tiuxetan, or rituximab, or is a B-Raf inhibitor such as debrafenib, a MEK inhibitor such as trametinib or a combination therapy of these agents.
[2659] 236. A method according to statement 235, wherein the further cancer treatment is pembrolizumab.
[2660] 237. A method according to statement 235, wherein the further cancer treatment is a combination therapy of debrafenib and trametinib.
[2661] 238. A method according to any one of statements 203-237, wherein the subject is mammalian.
[2662] 239. A method according to statement 238, wherein the subject is human.
[2663] 240. A method according to any one of statements 203-239, wherein the subject was selected for treatment with the agent capable of inhibiting or reversing EMT or a chemotherapeutic agent, using a predictive method according to any one of statements 101-202.
[2664] 241. A method according to any one of statements 203-240, wherein the sample is selected from: blood, serum, plasma, tissue biopsy, culture supernatant, or urine.
[2665] 242. A method according to statement 241, wherein the sample is a blood, serum, or plasma sample.
[2666] 243. A method according to statement 242, wherein the sample is a serum sample.
[2667] 244. A method according to any one of statements 1-243, wherein the method is performed in vitro or ex vivo.
[2668] 201a. A method of selecting subjects having, suspected of having, or diagnosed with melanoma for treatment with an agent capable of inhibiting or reversing EMT or a chemotherapeutic agent, the method comprising:
   [2669] identifying subjects susceptible to treatment with an agent capable of inhibiting or reversing EMT or a chemotherapeutic agent using a method according to any one of statements 101-244; and
   [2670] selecting thus identified subjects for treatment.
[2671] 202a. A method of selecting subjects having, suspected of having, or diagnosed with melanoma for continued treatment with an agent capable of inhibiting or reversing EMT or a chemotherapeutic agent, the method comprising:
   [2672] identifying subjects susceptible to treatment with an agent capable of inhibiting or reversing EMT or a chemotherapeutic agent using a method according to any one of statements 203-244; and
   [2673] selecting thus identified subjects for treatment.
[2674] 203a. A method according to any one of statements 201a-202a, wherein treatment comprises administering to the subject a therapeutically effective amount of an agent capable of inhibiting or reversing EMT or a chemotherapeutic agent.
[2675] 204a. A method according to statement 203a, wherein the treatment comprises an Axl inhibitor, Akt3 inhibitor, Slfn11 inhibitor, or PHGDH inhibitor.
[2676] 205a. A method according to statement 204a, wherein the treatment comprises an Axl inhibitor.
[2677] 206a. A method according to statement 205a, wherein the Axl inhibitor is BGB324/R428/bemcentinib, cabozantinib, TP-0903, foretinib, merestinib, bosutinib, gilteritinib, crizotinib, amuvatinib, sunitinib, sitravatinib, LDC1267, UNC2025, or an anti-Axl antibody described in WO2015/193428, WO2015/193430, WO2016/097370, or WO2016/166296.
[2678] 207a. A method according to statement 206a, wherein the Axl inhibitor is BGB324/R428/bemcentinib.
[2679] 208a. A method according to statement 206a, wherein the Axl inhibitor is an anti-Axl antibody described in WO2015/193428, WO2015/193430, WO2016/097370, or WO2016/166296.
[2680] 209a. A method according to statement 204a, wherein the treatment comprises an Akt3 inhibitor.
[2681] 210a. A method according to statement 209a, wherein the Akt3 inhibitor is an Akt3 inhibitor disclosed in WO2016/102672.
[2682] 211a. A method according to any one of statements 203a-210a, wherein the treatment is administered as a single agent.
[2683] 212a. A method according to any one of statements 203a-211a, wherein the treatment is administered in combination with a further cancer treatment.
[2684] 213a. A method according to statement 212a, wherein the further cancer treatment is selected from the further cancer treatments listed in statement 185.
[2685] 214a. A method according to statement 212a, wherein the further cancer treatment is a monoclonal antibody such as pembrolizumab, alemtuzumab, bevacizumab, cetuximab, ibritumomab tiuxetan, or rituximab, or is a B-Raf inhibitor such as debrafenib, a MEK inhibitor such as trametinib or a combination therapy of these agents.
[2686] 215a. A method according to statement 214a, wherein the further cancer treatment is pembrolizumab.
[2687] 216a. A method according to statement 214a, wherein the further cancer treatment is a combination therapy of debrafenib and trametinib.
[2688] 301. A diagnostic kit comprising 1, 2, 3, 4, 5, 6, 7, 8, 9, 10 or more reagents for detecting the activity, expression, or amount of one or more biomarkers, each of which is selective for a particular biomarker selected from the group consisting of: HB-EGF, AFP, CgA, Nr-CAM, KIM-1, CD40, LAP TGF-b1, EGF, IL-2 receptor alpha, hCG, TARC, CD40-L, VEGFR-3, TATI, MMP-7, Leptin, Apo A-I, Periostin, ANG-2, Cystatin-C, Hepsin Apo C-I, IL-1RI, Eotaxin-2, MPO, FRTN, Axl, and/or LDH.
[2689] 302. A test device comprising 1, 2, 3, 4, 5, 6, 7, 8, 9, 10 or more reagents for detecting the activity, expression, or amount of one or more biomarkers, each of which is selective for a particular biomarker selected from the group consisting of: HB-EGF, AFP, CgA, Nr-CAM, KIM-1, CD40, LAP TGF-b1, EGF, IL-2 receptor alpha, hCG, TARC, CD40-L, VEGFR-3, TATI, MMP-7, Leptin, Apo A-I, Periostin, ANG-2, Cystatin-C, Hepsin Apo C-I, IL-1RI, Eotaxin-2, MPO, FRTN, Axl, and/or LDH.
[2690] 303. A diagnostic kit or test device according to any one of statements 301 or 302, comprising:
   [2691] 1, 2, 3, 4, 5, 6, 7, 8, 9, 10 or more specific binding members, each of which selectively binds to a biomarker selected from the group consisting of: HB-EGF, AFP, CgA, Nr-CAM, KIM-1, CD40, LAP TGF-b1, EGF, IL-2 receptor alpha, hCG, TARC, CD40-L, VEGFR-3, TATI, MMP-7, Leptin, Apo A-I, Periostin, ANG-2, Cystatin-C, Hepsin Apo C-I, IL-1RI, Eotaxin-2, MPO, FRTN, Axl, and/or LDH; and
   [2692] one or more reagents for detecting said one or more specific binding members or one or more reagents for detecting and/or quantifying formation of a complex formed by said specific binding member and said biomarker.
[2693] 304. A diagnostic kit or test device according to statement 303, wherein the specific binding member comprises an antibody molecule or binding fragment thereof.
[2694] 305. A diagnostic kit or test device according to statement 303 or 304, wherein detecting formation of a complex formed by the specific binding member and the biomarker is carried out by use of a technique selected from: Western blot; enzyme-linked immunosorbent assay (ELISA); radioimmunoassay (RIA); competitive enzyme immunoassay; double antibody sandwich ELISA (DAS-ELISA); liquid immunoarray technology; immunocytochemistry; immunohistochemistry; antibody microarray detection; precipitation of colloidal gold; affinity chromatography; ligand binding assay; and lectin binding assay.
[2695] 306. A diagnostic kit or test device according to any one of statements 301-305, wherein the kit or test device comprises no more than 15, 20, 25, 30, 40, or 50 reagents for detecting.
[2696] 307. A diagnostic kit or test device according to any one of statements 301-306 for use in a method of predicting a cancer-related outcome in a subject.
[2697] 308. A diagnostic kit for use, or test device for use, according to statement 307, wherein the cancer-related outcome is susceptibility to treatment with an agent capable of inhibiting or reversing EMT or a chemotherapeutic agent.
[2698] 309. A diagnostic kit for use, or test device for use, according to statement 308, wherein the agent capable of inhibiting or reversing EMT or chemotherapeutic agent is an Axl inhibitor, Akt3 inhibitor, Slfn11 inhibitor, or PHGDH inhibitor.
[2699] 310. A diagnostic kit for use, or test device for use, according to statement 308, wherein the agent capable of inhibiting or reversing EMT or chemotherapeutic agent is an Axl inhibitor.
[2700] 311. A diagnostic kit for use, or test device for use, according to statement 310, wherein the Axl inhibitor is BGB324/R428/bemcentinib, cabozantinib, TP-0903, foretinib, merestinib, bosutinib, gilteritinib, crizotinib, amuvatinib, sunitinib, sitravatinib, LDC1267, UNC2025, or an anti-Axl antibody described in WO2015/193428, WO2015/193430, WO2016/097370, or WO2016/166296.
[2701] 312. A diagnostic kit for use, or test device for use, according to statement 311, wherein the Axl inhibitor is BGB324/R428/bemcentinib.
[2702] 313. A diagnostic kit for use, or test device for use, according to statement 311, wherein the Axl inhibitor is an anti-Axl antibody described in WO2015/193428, WO2015/193430, WO2016/097370, or WO2016/166296.
[2703] 314. A diagnostic kit for use, or test device for use, according to statement 308, wherein the agent capable of inhibiting or reversing EMT or chemotherapeutic agent is an Akt3 inhibitor.
[2704] 315. A diagnostic kit for use, or test device for use, according to any one of statements 307-310, wherein the subject has, is suspected of having, or has been diagnosed with melanoma.
[2705] 316. A diagnostic kit for use, or test device for use, according to any one of statements 307-315, wherein the method is a method according to any one of statements 101-244.
[2706] 317. Use of a reagent for detecting the activity, expression, or amount of a biomarker selected from the group consisting of: HB-EGF, AFP, CgA, Nr-CAM, KIM-1, CD40, LAP TGF-b1, EGF, IL-2 receptor alpha, hCG, TARO, CD40-L, VEGFR-3, TATI, MMP-7, Leptin, Apo A-I, Periostin, ANG-2, Cystatin-C, Hepsin Apo C-I, IL-1RI, Eotaxin-2, MPO, FRTN, Axl, and/or LDH in a method of predicting a cancer-related outcome in a subject.
[2707] 318. Use of 1, 2, 3, 4, 5, 6, 7, 8, 9, 10 or more reagents for detecting the activity, expression, or amount a biomarker, each of which is selective for a particular biomarker selected from the group consisting of: HB-EGF, AFP, CgA, Nr-CAM, KIM-1, CD40, LAP TGF-b1, EGF, IL-2 receptor alpha, hCG, TARC, CD40-L, VEGFR-3, TATI, MMP-7, Leptin, Apo A-I, Periostin, ANG-2, Cystatin-C, Hepsin Apo C-I, IL-1RI, Eotaxin-2, MPO, FRTN, Axl, and/or LDH, in a method of manufacture of a diagnostic kit or test device for use in a method of predicting a cancer-related outcome in a subject.
[2708] 319. A use according to statement 317 or 318, wherein the reagent for detecting comprises a specific binding member selective for a particular biomarker.
[2709] 320. A use according to statement 317 or 318, wherein the method of predicting a cancer-related outcome in a subject is a method according to any one of statements 101-244.
[2710] 401. Use of one or more of: HB-EGF, AFP, CgA, Nr-CAM, KIM-1, CD40, LAP TGF-b1, EGF, IL-2 receptor alpha, hCG, TARC, CD40-L, VEGFR-3, TATI, MMP-7, Leptin, Apo A-I, Periostin, ANG-2, Cystatin-C, Hepsin Apo C-I, IL-1RI, Eotaxin-2, MPO, FRTN, Axl, and/or LDH as a biomarker for determining if a subject is susceptible to treatment with an agent capable of inhibiting or reversing EMT or a chemotherapeutic agent.
[2711] 402. A use according to statement 401, wherein:
   [2712] (i) a higher activity, expression, or amount of one or more of said biomarkers in the subject, or sample derived from the subject, compared with a control profile for the respective biomarker is indicative of susceptibility to treatment with an agent capable of inhibiting or reversing EMT or a chemotherapeutic agent; or
   [2713] (ii) a lower activity, expression, or amount of one or more of said biomarkers in the subject, or sample derived from the subject, compared with a control profile for the respective biomarker is indicative of susceptibility to treatment with an agent capable of inhibiting or reversing EMT or a chemotherapeutic agent.
[2714] 403. A use according to statement 401, wherein:
   [2715] (i) an increase in the activity, expression, or amount of one or more biomarker relative to a control profile for the respective biomarker after contacting the subject with a cancer therapeutic agent is indicative of increased susceptibility to treatment with an agent capable of inhibiting or reversing EMT or a chemotherapeutic agent; or
   [2716] (ii) a decrease in the activity, expression, or amount of one or more biomarker relative to a control profile for the respective biomarker after contacting the subject with a cancer therapeutic agent is indicative of increased susceptibility to treatment with an agent capable of inhibiting or reversing EMT or a chemotherapeutic agent.
[2717] 404. A use according to any one of statements 401-403, wherein the use is as a biomarker in a method according to any one of statements 101-244
[2718] 501. A method of treating a subject having, suspected of having, or diagnosed with melanoma, the method comprising:
   [2719] identifying a subject susceptible to treatment using a method according to any one of statements 101-244; and
   [2720] administering to the subject a therapeutically effective amount of an agent capable of inhibiting or reversing EMT or a chemotherapeutic agent.
[2721] 502. A method of treating a subject having, suspected of having, or diagnosed with melanoma, the method comprising:
   [2722] (a) obtaining a sample from the subject;
   [2723] (b) determining if the subject is susceptible to treatment with an agent capable of inhibiting or reversing EMT or a chemotherapeutic agent using a method according to any one of statements 101-244;
   [2724] (c) administering to the subject a therapeutically effective amount of an agent capable of inhibiting or reversing EMT or a chemotherapeutic agent.
[2725] 503. A method of treating a subject having, suspected of having, or diagnosed with melanoma, the method comprising administering a therapeutically effective amount of an agent capable of inhibiting or reversing EMT or chemotherapeutic agent to a subject identified as susceptible to said treatment using a method according to any one of statements 101-244.
[2726] 504. A method of treating a subject having, suspected of having, or diagnosed with melanoma, the method comprising:
   [2727] administering to the subject a therapeutically effective amount of an agent capable of inhibiting or reversing EMT or a chemotherapeutic agent; and
   [2728] determining if the subject is susceptible to said treatment using a method according to any one of statements 203-244.
[2729] 505. A method according to statement 504, wherein the method comprises administering to the subject one or more further therapeutically effective amounts of an agent capable of inhibiting or reversing EMT or a chemotherapeutic agent provided that the subject is identified as susceptible to said treatment.
[2730] 506. An agent capable of inhibiting or reversing EMT or chemotherapeutic agent for use in a method of treating a subject having, suspected of having, or diagnosed with melanoma, wherein the method is a method according to any one of statements 501-505.
[2731] 507. Use of an agent capable of inhibiting or reversing EMT or chemotherapeutic agent for use in a method of manufacture of a medicament for use in a method of treating a subject having, suspected of having, or diagnosed with melanoma,
   [2732] wherein the method of treatment is a method according to any one of statements 501-505.
[2733] 508. A method, agent for use, or use according to any one of statements 501-507, wherein the agent capable of inhibiting or reversing EMT or chemotherapeutic agent comprises an Axl inhibitor, Akt3 inhibitor, Slfn11 inhibitor, or PHGDH inhibitor.
[2734] 509. A method, agent for use, or use according to statement 508, wherein the agent capable of inhibiting or reversing EMT or chemotherapeutic agent comprises an Axl inhibitor.
[2735] 510. A method, agent for use, or use according to statement 509, wherein the Axl inhibitor is BGB324/R428/bemcentinib, cabozantinib, TP-0903, foretinib, merestinib, bosutinib, gilteritinib, crizotinib, amuvatinib, sunitinib, sitravatinib, LDC1267, UNC2025, or an anti-Axl antibody described in WO2015/193428, WO2015/193430, WO2016/097370, or WO2016/166296.
[2736] 511. A method, agent for use, or use according to statement 510, wherein the Axl inhibitor is BGB324/R428/bemcentinib.
[2737] 512. A method, agent for use, or use according to statement 510, wherein the Axl inhibitor is an anti-Axl antibody described in WO2015/193428, WO2015/193430, WO2016/097370, or WO2016/166296.
[2738] 512. A method, agent for use, or use according to statement 508, wherein the agent capable of inhibiting or reversing EMT or chemotherapeutic agent comprises an Akt3 inhibitor.
[2739] 513. A method, agent for use, or use according to statement 512, wherein the Akt3 inhibitor is an Akt3 inhibitor disclosed in WO2016/102672.
[2740] 514. A method, agent for use, or use according to any one of statements 501-513, wherein the agent capable of inhibiting or reversing EMT or chemotherapeutic agent is administered as a single agent.
[2741] 515. A method, agent for use, or use according to any one of statements 501-513, wherein the agent capable of inhibiting or reversing EMT or chemotherapeutic agent is administered in combination with a further cancer treatment.
[2742] 516. A method, agent for use, or use according to statement 515, wherein the further cancer treatment is selected from the further cancer treatments listed in statement 185.
[2743] 517. A method, agent for use, or use according to statement 515, wherein the further cancer treatment is a monoclonal antibody such as pembrolizumab, alemtuzumab, bevacizumab, cetuximab, ibritumomab tiuxetan, or rituximab, or is a B-Raf inhibitor such as debrafenib, a MEK inhibitor such as trametinib or a combination therapy of these agents.
[2744] 518. A method, agent for use, or use according to statement 517, wherein the further cancer treatment is pembrolizumab.
[2745] 519. A method, agent for use, or use according to statement 517, wherein the further cancer treatment is a combination therapy of debrafenib and trametinib.

[2746] Facet 5: Triple Negative Breast Cancer (TNBC)

[2747] Triple-negative breast cancers (TNBC) are a heterogeneous group of breast cancers that do not express the genes for estrogen receptor (ER), progesterone receptor (PR) and Her2/neu. Because most hormone therapies target one of these receptors, triple-negative breast cancers are among the most difficult to treat, typically requiring combination therapy. In view of the significant degree of heterogeneity in triple-negative breast cancers and patient response to drug therapies, there remains a need for targeted therapies for triple-negative breast cancers (Jhan et al, 2017).

[2748] Accordingly, robust biomarkers for predicting cancer-related outcomes in a subject having triple-negative breast cancer, for example susceptibility to treatment with an agent capable of inhibiting or reversing EMT or a chemotherapeutic agent, would be useful in identifying subjects who are most likely to respond to or benefit from treatment with a particular agent/regimen.

[2749] A “responder” subject as described herein is a subject who is likely to, or who does, respond to treatment (or benefit from treatment) with an agent capable of inhibiting or reversing EMT or a chemotherapeutic agent, for example the small molecule Axl kinase inhibitor BGB324/R428/bemcentinib when administered either as a single agent or in combination with another cancer treatment.

[2750] Correspondingly, a “non-responder” subject as described herein is a subject who is not likely to, or who does not, respond to treatment (or benefit from treatment) with an agent capable of inhibiting or reversing EMT or a chemotherapeutic agent, for example the small molecule Axl kinase inhibitor BGB324/R428/bemcentinib when administered either as a single agent or in combination with another cancer treatment.

[2751] To “respond to treatment” or “benefit from treatment” as used herein means to experience an overall clinical benefit from the treatment. This overall clinical benefit can be any of: prolonged survival, partial or complete disease remission, slowing or absence of disease progression, tumour shrinkage (for example, a reduction in tumour volume of 5, 10, 20, 30, 40% or more), reduction in tumour burden (for example, a reduction in tumour burden of 5, 10, 20, 30, 40% or more), slowing or absence of tumour enlargement, slowing or absence of increase in tumour burden, improved quality of life, progression-free survival, overall survival, or any other positive patient outcome. Suitable methods for determining tumour volume are well known to the skilled person, for example, using: computed tomography (CT), or magnetic resonance imaging (MRI) imaging technologies; X-ray imaging, for example, mammography; ultrasound imaging; nuclear imaging, for example positron emission tomography (PET), PET/CT scans, bone scans, gallium scans, or metaiodobenzylguanidine (MIBG) scans; bioluminescence imaging (BLI); fluorescence imaging (FLI); BD ToF (infrared-based 3D Time-of-Flight camera) imaging.

[2752] Biomarkers

[2753] The term “marker” or “biomarker” is used herein to refer to a gene or protein whose expression in a subject or sample derived from a subject is altered or modulated, for example, up or down regulated, in cancer. Where the biomarker is a protein, modulation or alteration of expression encompasses modulation through different post-translational modifications.

[2754] In accordance with any aspect of this facet of the present disclosure the biomarkers described herein may be defined as follows, wherein:
[2755] an Axl biomarker comprises an amino acid sequence having at least 70%, 80%, 90%, 95%, 99% or 100% sequence identity with the full-length of the amino acid sequence disclosed at UniProt accession no: P30530-1 or P30530-2 (entry version 196) or a fragment thereof;
[2756] an Interleukin-6 receptor subunit beta (IL-6R beta) biomarker comprises an amino acid sequence having at least 70%, 80%, 90%, 95%, 99% or 100% sequence identity with the full-length of the amino acid sequence disclosed at UniProt accession no: P40189-1 or P40189-2 (entry version 209) or a fragment thereof;
[2757] an Intercellular Adhesion Molecule 1 (ICAM-1) biomarker comprises an amino acid sequence having at least 70%, 80%, 90%, 95%, 99% or 100% sequence identity with the full-length of the amino acid sequence disclosed at UniProt accession no: P05362 (entry version 221) or a fragment thereof;
[2758] a Macrophage Inflammatory Protein-1 beta (MIP-1 beta) biomarker comprises an amino acid sequence having at least 70%, 80%, 90%, 95%, 99% or 100% sequence identity with the full-length of the amino acid sequence disclosed at UniProt accession no: P13236 (entry version 187) or a fragment thereof;
[2759] a Periostin biomarker comprises an amino acid sequence having at least 70%, 80%, 90%, 95%, 99% or 100% sequence identity with the full-length of the amino acid sequence disclosed at UniProt accession no: Q15063-1, Q15063-2, Q15063-3, Q15063-4, Q15063-5, Q15063-6, Q15063-7 (entry version 160) or a fragment thereof;
[2760] an Interleukin-23 (IL-23) biomarker comprises an amino acid sequence having at least 70%, 80%, 90%, 95%, 99% or 100% sequence identity with the full-length of the amino acid sequence disclosed at UniProt accession no: Q9NPF7 (entry version 133) or a fragment thereof;
[2761] a Folate receptor gamma (FOLR3) biomarker comprises an amino acid sequence having at least 70%, 80%, 90%, 95%, 99% or 100% sequence identity with the full-length of the amino acid sequence disclosed at UniProt accession no: P41439-1, P41439-2, or P41439-3 (entry version 127) or a fragment thereof;
[2762] a Clusterin (CLU) biomarker comprises an amino acid sequence having at least 70%, 80%, 90%, 95%, 99% or 100% sequence identity with the full-length of the amino acid sequence disclosed at UniProt accession no: P10909-1, P10909-2, P10909-3, P10909-4, or P10909-5 (entry version 209) or a fragment thereof; and/or
[2763] a Fas Ligand (FasL) biomarker comprises an amino acid sequence having at least 70%, 80%, 90%, 95%, 99% or 100% sequence identity with the full-length of the amino acid sequence disclosed at UniProt accession no: P48023-1 or P48023-2 (entry version 197) or a fragment thereof.

[2764] The biomarkers described herein may also be defined as a nucleic acid (either DNA or RNA) having at least 70%, 80%, 90%, 95%, 99% or 100% sequence identity with the full-length nucleic acid sequence encoding any of the above amino acid sequences.

[2765] Identity may be as defined using sequence comparisons made using FASTA and FASTP (see Pearson & Lipman, 1988. Methods in Enzymology 183: 63-98). Parameters are preferably set, using the default matrix, as follows: Gapopen (penalty for the first residue in a gap): −12 for proteins/-16 for DNA; Gapext (penalty for additional residues in a gap): −2 for proteins/-4 for DNA; KTUP word length: 2 for proteins/6 for DNA.

[2766] Pre-Treatment Predictive Biomarkers and Methods

[2767] By analysing patient data obtained from clinical trial BGBC007 (NCT03184558), the authors have discovered that, prior to treatment of subjects having TNBC, certain of the biomarkers described herein are present in the serum of “responder” subjects at higher levels than in the serum of “non-responder” subjects—see Example 3. Similarly, prior to treatment of the subject certain of the biomarkers described herein are present in the serum of “responder” subjects at lower levels than in the serum of “non-responder” subjects. Thus, by assessing the activity, expression, or amount of one or more of the biomarkers described herein prior to treatment with an agent capable of inhibiting or reversing EMT or a chemotherapeutic agent it is possible to determine the likelihood of that subject being susceptible or responsive to treatment with said agent.

[2768] Accordingly, in a first aspect of this facet, the disclosure provides a method of predicting a cancer-related outcome in a subject having, suspected of having, or diagnosed with triple-negative breast cancer (TNBC), the method comprising assessing the activity, expression, or amount of one or more of the biomarkers described herein in the subject, or in a sample derived from the subject.

[2769] In some embodiments the one or more biomarker is selected from the group consisting of: Axl, Interleukin-6 receptor subunit beta (IL-6R beta), Intercellular Adhesion Molecule 1 (ICAM-1), Macrophage Inflammatory Protein-1 beta (MIP-1 beta), Periostin, Interleukin-23 (IL-23), Folate receptor gamma (FOLR3), Clusterin (CLU), and/or Fas Ligand (FasL).

[2770] A “cancer-related outcome” as described herein is a clinical prediction or prognosis associated with cancer. In some embodiments the cancer-related outcome is susceptibility to treatment with an agent capable of inhibiting or reversing EMT or a chemotherapeutic agent.

[2771] In some embodiments the method comprises assessing the activity, expression, or amount of one or more of the biomarkers described herein in the subject, or in a sample derived from the subject, to obtain a sample profile of the one or more biomarker; and, making a prediction based on the sample profile of the one or more biomarker.

[2772] A “sample profile” as used herein is a profile of numerical values or numerical ranges corresponding to the activity, expression, or amount of respective biomarkers determined in the subject or sample derived from the subject.

[2773] In some embodiments of the method the prediction is made by comparing the sample profile to a control profile. A “control profile” as used herein is a profile of numerical values or numerical ranges corresponding to the activity, expression, or amount of the same biomarkers as for the sample profile, determined in a control subject or population of control subjects. Suitable control profiles are described in more detail below.

[2774] Prior to treatment of a subject, certain of the biomarkers described herein have been found to exhibit up-regulated expression in “responder” subjects—that is, certain of the biomarkers described herein have been found to be present in the serum of “responder” subjects at higher levels than in the serum of “non-responder” subjects. Similarly, prior to treatment of a subject, certain of the biomarkers described herein have been found to exhibit down-regulated expression in “responder” subjects—that is, certain of the biomarkers described herein have been found to be present in the serum of “responder” subjects at lower levels than in the serum of “non-responder” subjects.

[2775] This difference in expression level between “responder” and “non-responder” subjects can also be expressed in the opposite way. That is to say, prior to treatment of a subject, certain of the biomarkers described herein have been found to exhibit down-regulated expression in “non-responder” subjects—that is, certain of the biomarkers described herein have been found to be present in the serum of “non-responder” subjects at lower levels than in the serum of “responder” subjects. Similarly, prior to treatment of a subject, certain of the biomarkers described herein have been found to exhibit up-regulated expression in “non-responder” subjects—that is, certain of the biomarkers described herein have been found to be present in the serum of “non-responder” subjects at higher levels than in the serum of “responder” subjects.

[2776] The discovery of these differential patterns of expression mean that, by assessing the activity, expression, or amount of one or more of the biomarkers described herein prior to treatment of a subject with an agent, it is possible to determine the likelihood of that subject being susceptible or responsive to treatment with said agent. Accordingly, in particularly preferred embodiments the sample profile is obtained before the subject is contacted with or administered the agent capable of inhibiting or reversing EMT or a chemotherapeutic agent.

[2777] A subject who is “susceptible to treatment” with an agent capable of inhibiting or reversing EMT or a chemotherapeutic agent is one who is likely to, or who does, respond to treatment (or benefit from treatment) with an agent capable of inhibiting or reversing EMT or a chemotherapeutic agent. That is, a subject who is “susceptible to treatment” with an agent is a “responder” subject for that agent, as defined above. A prediction that is “indicative of susceptibility” is one which suggests or points towards the likelihood that a subject will respond to or benefit from treatment.

[2778] In some embodiments the predictive methods of the disclosure comprise assessing the activity, expression, or amount of one or more of the biomarkers described herein in the subject, or in a sample derived from the subject, to obtain a sample profile of the one or more biomarker; and, making a prediction based on the sample profile of the one or more biomarker. In some embodiments of the method the prediction is made by comparing the sample profile to a control profile, wherein the control profile is a profile of numerical values or numerical ranges corresponding to the activity, expression, or amount of the same biomarkers as for the sample profile, determined in a control subject or population of control subjects.

[2779] In some embodiments the control profile may be obtained from a population of control subjects having TNBC. In some embodiments the control profile may be obtained from a population of control subjects not having TNBC. In other embodiments the control profile may be obtained from a control subject or population of control subjects having TNBC and previously found to lack susceptibility to treatment with an agent capable of inhibiting or reversing EMT or a chemotherapeutic agent (that is, non-responder subjects).

[2780] In some embodiments the control profile may a predetermined profile of biomarker expression, activity, or amount values, for example a profile of “mean” values, “threshold” values, or “standard ranges” of values. This predetermined profile of biomarker expression, activity, or amount values can be obtained, for example, from a control subject or population of control subjects having TNBC, a control subject or population of control subjects not having TNBC, or a control subject or population of control subjects having TNBC and previously found to lack susceptibility to treatment with an agent capable of inhibiting or reversing EMT or a chemotherapeutic agent (that is, non-responder subjects).

[2781] In some other embodiments the control profile may be obtained from a control subject or population of control subjects having TNBC and previously found to be susceptible to treatment with an agent capable of inhibiting or reversing EMT or a chemotherapeutic agent (that is, responder subjects). In some embodiments the control profile may a predetermined profile of biomarker expression, activity, or amount values, for example a profile of “threshold”, values or “standard ranges” of values. This predetermined profile of biomarker expression, activity, or amount values can be obtained, for example, from a control subject or population of control subjects having TNBC and previously found to be susceptible to treatment with an agent capable of inhibiting or reversing EMT or a chemotherapeutic agent (that is, responder subjects).

[2782] In some other embodiments the control profile may be obtained from a control sample having a known amount (for example a “threshold” amount) of the same biomarkers as will be determined in the sample profile. This threshold amount can be obtained, for example, from non-responder or responder subjects as outlined above.

[2783] The skilled person is readily able to determine suitable “mean”, “threshold”, or “standard range” values for a particular biomarker.

[2784] For example, a “mean” value may be determined by: assessing the activity, expression, or amount of a particular biomarker in a population of subjects having (or not having) TNBC; and, averaging the biomarker activity, expression, or amount determined to determine a “mean” value.

[2785] For example, a “mean” value may be determined by: assessing the activity, expression, or amount of a particular biomarker in a population of subjects; determining which subjects in the population are susceptible to treatment with an agent capable of inhibiting or reversing EMT or a chemotherapeutic agent; and, averaging the biomarker activity, expression, or amount determined in subjects found to be susceptible to treatment with an agent capable of inhibiting or reversing EMT or a chemotherapeutic agent (that is, responder subjects) to determine a “mean” value.

[2786] For example, a “threshold” value may be determined by: assessing the activity, expression, or amount of a particular biomarker in a population of subjects; determining which subjects in the population are susceptible to treatment with an agent capable of inhibiting or reversing EMT or a chemotherapeutic agent; and, selecting as appropriate the highest or lowest biomarker activity, expression, or amount determined in a subject found to be susceptible to treatment with an agent capable of inhibiting or reversing EMT or a chemotherapeutic agent (that is, a responder subject) as the “threshold value”.

[2787] For example, a “standard range” of values may be determined by: assessing the activity, expression, or amount of a particular biomarker in a population of subjects having (or not having) TNBC; and, determining a “standard range” of values based on this assessment.

[2788] For example, a “standard range” of values may be determined by: assessing the activity, expression, or amount of a particular biomarker in a population of subjects; determining which subjects in the population are susceptible to treatment with an agent capable of inhibiting or reversing EMT or a chemotherapeutic agent; and, determining a “standard range” of values for subjects found to be susceptible to treatment with an agent capable of inhibiting or reversing EMT or a chemotherapeutic agent (that is, a responder subject) based on this assessment.

[2789] Where the control profile is a predetermined profile of biomarker expression, activity, or amount values, this may be provided as a “look-up table” or data record. Predetermined control profiles of this type may be a profile of numerical values or numerical ranges corresponding to a measure of central tendency (such as an average, median or mean) amount of the respective biomarkers determined in a plurality of control subjects (for example non-responder or responder subjects as outlined above). The skilled person is readily able to determine both a measure of central tendency and a measure of variability within a population using standard protein quantification techniques and suitable statistical tools.

[2790] Accordingly, in embodiments in which the control profile is: obtained from a population of control subjects having TNBC; obtained from a population of control subjects not having TNBC; obtained from a control subject or population of control subjects having TNBC and previously found to lack susceptibility to treatment with an agent capable of inhibiting or reversing EMT or a chemotherapeutic agent (that is non-responder subjects); a predetermined profile of biomarker expression, activity, or amount values (for example a profile of “average, median, or mean” values or “standard ranges” of values) obtained from non-responder subjects; obtained from a control sample having a known “average, median, or mean” value of biomarkers indicative of non-responder subjects; a predetermined profile of biomarker expression, activity, or amount “threshold” values obtained from responder subjects; or, obtained from a control sample having a known “threshold” value of biomarkers indicative of responder subjects; then, a higher activity, expression, or amount of one or more of the biomarkers described herein in a sample profile as compared with the control profile may be indicative of susceptibility to treatment with an agent capable of inhibiting or reversing EMT or a chemotherapeutic agent. Similarly, a lower activity, expression, or amount of one or more of the biomarkers described herein in the sample profile as compared with a control profile may be indicative of susceptibility to treatment with an agent capable of inhibiting or reversing EMT or a chemotherapeutic agent.

[2791] In some such embodiments, the method may comprise assessing the activity, expression, or amount of one or more of biomarker selected from: IL-23, FOLR3, CLU, and/or FasL; wherein a higher activity, expression, or amount of one or more of said biomarkers in the sample profile as compared with the control profile is indicative of susceptibility to treatment with an agent capable of inhibiting or reversing EMT or a chemotherapeutic agent.

[2792] In some such embodiments, the method may comprise assessing the activity, expression, or amount of one or more of biomarker selected from: Axl, IL-6R beta, ICAM-1, MIP-1 beta, and/or Periostin; wherein a lower activity, expression, or amount of one or more of said biomarkers in the sample profile as compared with the control profile is indicative of susceptibility to treatment with an agent capable of inhibiting or reversing EMT or a chemotherapeutic agent.

[2793] In some such embodiments: a lower activity, expression, or amount of Axl; and/or a lower activity, expression, or amount of IL-6R beta; and/or a lower activity, expression, or amount of ICAM-1; and/or a lower activity, expression, or amount of MIP-1 beta; and/or a lower activity, expression, or amount of Periostin; and/or a higher activity, expression, or amount of IL-23; and/or a higher activity, expression, or amount of FOLR3; and/or a higher activity, expression, or amount of CLU; and/or a higher activity, expression, or amount of FasL; in the sample profile as compared with the control profile is indicative of susceptibility to treatment with an agent capable of inhibiting or reversing EMT or a chemotherapeutic agent.

[2794] In embodiments in which the control profile is: obtained from a control subject or population of control subjects having TNBC and previously found to be susceptible to treatment with an agent capable of inhibiting or reversing EMT or a chemotherapeutic agent (that is, responder subjects); then, if the expression, activity, or amount values in the sample profile are above a “threshold” value typical of a responder subject (that is, a subject having TNBC and previously found to be susceptible to treatment with an agent capable of inhibiting or reversing EMT or a chemotherapeutic agent) this is indicative of susceptibility to treatment with an agent capable of inhibiting or reversing EMT or a chemotherapeutic agent. Similarly, if the expression, activity, or amount values in the sample profile are below the “threshold” value typical of a responder subject (that is, a subject having TNBC and previously found to be susceptible to treatment with an agent capable of inhibiting or reversing EMT or a chemotherapeutic agent) this is indicative of a lack of susceptibility to treatment with an agent capable of inhibiting or reversing EMT or a chemotherapeutic agent.

[2795] In embodiments in which the control profile is: a predetermined profile of “standard ranges” of biomarker expression, activity, or amount values obtained from responder subjects; then, if the expression, activity, or amount values in the sample profile are within the “standard range” of values typical of a responder subject (that is, a subject having TNBC and previously found to be susceptible to treatment with an agent capable of inhibiting or reversing EMT or a chemotherapeutic agent) this is indicative of susceptibility to treatment with an agent capable of inhibiting or reversing EMT or a chemotherapeutic agent. Similarly, if the expression, activity, or amount values in the sample profile are outside the “standard range” of values typical of a responder subject (that is, a subject having TNBC and previously found to be susceptible to treatment with an agent capable of inhibiting or reversing EMT or a chemotherapeutic agent) this is indicative of a lack of susceptibility to treatment with an agent capable of inhibiting or reversing EMT or a chemotherapeutic agent.

[2796] In embodiments in which the control profile is: a predetermined profile of “standard ranges” of biomarker expression, activity, or amount values obtained from non-responder subjects; then, if the expression, activity, or amount values in the sample profile are within the “standard range” of values typical of a non-responder subject (that is, a subject having TNBC and previously found to lack susceptibility to treatment with an agent capable of inhibiting or reversing EMT or a chemotherapeutic agent) this is indicative of a lack of susceptibility to treatment with an agent capable of inhibiting or reversing EMT or a chemotherapeutic agent. Similarly, if the expression, activity, or amount values in the sample profile are outside the “standard range” of values typical of a non-responder subject (that is, a subject having TNBC and previously found to lack susceptibility to treatment with an agent capable of inhibiting or reversing EMT or a chemotherapeutic agent) this may be indicative of susceptibility to treatment with an agent capable of inhibiting or reversing EMT or a chemotherapeutic agent.

[2797] In embodiments in which the control profile is: obtained from a population of control subjects not having TNBC; then, if the expression, activity, or amount values in the sample profile are outside a “standard range” of values typical of subjects not having TNBC, this is indicative of susceptibility to treatment with an agent capable of inhibiting or reversing EMT or a chemotherapeutic agent. Similarly, if the expression, activity, or amount values in the sample profile are within a “standard range” of values typical of subjects not having TNBC, this is indicative of a lack of susceptibility to treatment with an agent capable of inhibiting or reversing EMT or a chemotherapeutic agent. In such cases, an expression, activity or amount value may be outside the “standard range” of values when it is either above the upper limit of normal or below the lower limit of normal for a given biomarker. The upper limit of normal and lower limit of normal are the limits of the normal distribution of a given biomarker in a population of control subjects not having TNBC.

[2798] The skilled person is readily able to determine whether the sample profile is indicative of susceptibility or lack of susceptibility to treatment with an agent capable of inhibiting or reversing EMT or a chemotherapeutic agent using suitable statistical tools and comparison with the appropriate control.

[2799] In some embodiments the sample profile may be compared with two or more control profiles as described above.

[2800] As used herein, the term “one or more” means 1, 2, 3, 4, 5, 6, 7, 8, 9, 10, 11, 12, 13, 14, 15, 16, 17, 18, 19, or 20 of the biomarkers described herein. In some embodiments the one or more biomarker is Axl. In some embodiments the one or more biomarker is IL-6R beta. In some embodiments the one or more biomarker is ICAM-1. In some embodiments the one or more biomarker is MIP-1 beta. In some embodiments the one or more biomarker is Periostin. In some embodiments the one or more biomarker is IL-23. In some embodiments the one or more biomarker is FOLR3. In some embodiments the one or more biomarker is CLU. In some embodiments the one or more biomarker is FasL.

[2801] In some embodiments the method may comprise assessing the activity, expression, or amount of at least 2, 3, 4, 5, 6, 7, 8, 9, 10, 11, 12, 13, 14, 15, 20 of said biomarkers in the subject, or in a sample derived from the subject. In some embodiments the method may comprise assessing the activity, expression, or amount of Axl and at least 1, 2, 3, 4, 5, 6, 7, 8, 9, 10, 11, 12, 13, 14, 15, 20 further biomarkers described herein in the subject, or in a sample derived from the subject.

[2802] Subject

[2803] A “subject” as referred to herein is any species of animal classified as a mammal, and includes but is not restricted to, domestic and farm animals, primates and humans. In some preferred embodiments the subject is a human of any sex or race. In some embodiments, the human is an adult human.

[2804] In some embodiments the predictive methods described herein are performed before the subject receives a treatment or course of treatment for TNBC. In other embodiments the predictive method is performed during or after a treatment or course of treatment for TNBC. In some embodiments the treatment or course of treatment for TNBC is an agent capable of inhibiting or reversing EMT. In other embodiments the treatment or course of treatment for TNBC is a chemotherapeutic treatment that is not an agent capable of inhibiting or reversing EMT.

[2805] In some embodiments of the predictive methods described herein the subject has previously been treated with an agent capable of inhibiting or reversing EMT or a chemotherapeutic agent. In some embodiments the subject has previously been treated with an agent selected from: a PHGDH inhibitor, a Slfn11 inhibitor, an Axl inhibitor, or an Akt3 inhibitor.

[2806] In some embodiments of the predictive methods described herein the subject has previously been treated with an agent that is different to the agent capable of inhibiting or reversing EMT or chemotherapeutic agent for which the subject's response is being predicted. That is, the subject has previously been treated with an agent that is not the agent which the predictive method is determining the subject's susceptibility to. Accordingly, in some embodiments, the subject has not previously been treated with an agent capable of inhibiting or reversing EMT or a chemotherapeutic agent. In some preferred embodiments, the subject has not previously been treated with an Axl inhibitor. In other preferred embodiments, the subject has not previously been treated with an Akt3 inhibitor.

[2807] Post-Treatment Changes in Biomarkers

[2808] In some embodiments of this aspect of the disclosure, the predictive method further comprises a subsequent step of assessing the activity, expression, or amount of one or more biomarker in the subject, or in a sample derived from the subject, to obtain a second sample profile of one or more of the biomarkers described herein after the subject has received a treatment or course of treatment an agent capable of inhibiting or reversing EMT or a chemotherapeutic agent.

[2809] That is, in some embodiments, the predictive method comprises:
[2810] (a) determining if a subject is susceptible to treatment with an agent capable of inhibiting or reversing EMT or a chemotherapeutic agent by assessing the activity, expression, or amount of one or more biomarker in the subject, as outlined above;
[2811] (b) administering to the subject a therapeutically effective amount of an agent capable of inhibiting or reversing EMT or a chemotherapeutic agent; and
[2812] (c) subsequently assessing the activity, expression, or amount of one or more biomarker in the subject, or in a sample derived from the subject.

[2813] In some embodiments, the predictive method comprises:
[2814] (a) determining if a subject is susceptible to treatment with an agent capable of inhibiting or reversing EMT or a chemotherapeutic agent by assessing the activity, expression, or amount of one or more biomarker in the subject, or in a sample derived from the subject, wherein the one or more biomarker is selected from the group consisting of: Axl, IL-6R beta, ICAM-1, MIP-1 beta, Periostin, IL-23, FOLR3, CLU, and/or FasL;
[2815] (b) administering to the subject a therapeutically effective amount of an agent capable of inhibiting or reversing EMT or a chemotherapeutic agent; and
[2816] (c) subsequently assessing the activity, expression, or amount of one or more biomarker in the subject, or in a sample derived from the subject.

[2817] In some preferred embodiments the methods comprise subsequently assessing the activity, expression, or amount of Axl in the subject, or in a sample derived from the subject. In some embodiments an increase in the activity, expression, or amount of Axl in the second sample profile as compared with a control profile after contacting the subject with a cancer therapeutic agent is indicative of higher susceptibility to treatment with an agent capable of inhibiting or reversing EMT or a chemotherapeutic agent. In some preferred embodiments the control profile is obtained from the same subject prior to treatment with an agent capable of inhibiting or reversing EMT or a chemotherapeutic agent.

[2818] Post-Treatment Predictive Biomarkers and Methods

[2819] By analysing patient data obtained from clinical trial BGBC007 (NCT03184558), the authors have discovered that, following treatment of subjects having TNBC with an agent capable of inhibiting or reversing EMT or a chemotherapeutic agent, the levels of certain of the biomarkers described herein increases in the serum of “responder” subjects but not in the serum of “non-responder” subjects. Similarly, following treatment with an agent capable of inhibiting or reversing EMT or a chemotherapeutic agent, the levels of certain of the biomarkers described herein decreases in the serum of “responder” subjects but not in the serum of “non-responder” subjects. Thus, by assessing the activity, expression, or amount of one or more of the biomarkers described herein prior to and following treatment with an agent capable of inhibiting or reversing EMT or a chemotherapeutic agent it is possible to determine or confirm that the subject is susceptible or responsive to treatment with said agent.

[2820] Accordingly, in an second aspect of this facet the disclosure provides a method of predicting a cancer-related outcome in a subject having, suspected of having, or diagnosed with triple-negative breast cancer (TNBC), the method comprising assessing the activity, expression, or amount of one or more of the biomarkers described herein in a subject, or in a sample derived from the subject after the subject has been contacted with an agent capable of inhibiting or reversing EMT or a chemotherapeutic agent. In some embodiments the cancer-related outcome is susceptibility to treatment with an agent capable of inhibiting or reversing EMT or a chemotherapeutic agent.

[2821] In some embodiments the method comprises assessing the activity, expression, or amount of one or more of the biomarkers described herein in the subject, or in a sample derived from the subject, to obtain a sample profile of the one or more biomarker; and, making a prediction based on the sample profile of the one or more biomarker. In some embodiments of the method the prediction is made by comparing the sample profile to a control profile. In preferred embodiments the sample profile is obtained after contacting the subject with an agent capable of inhibiting or reversing EMT or a chemotherapeutic agent.

[2822] A “control profile” as used herein is a profile of numerical values or numerical ranges corresponding to the activity, expression, or amount of the same biomarkers as for the sample profile, determined in a control subject or population of control subjects.

[2823] In preferred embodiments of this aspect of the disclosure the control profile is obtained from the same subject prior to treatment with an agent capable of inhibiting or reversing EMT or a chemotherapeutic agent. In some embodiments the control profile is obtained from a population of control subjects having TNBC. In other embodiments, the control profile is a predetermined profile of biomarker expression, activity, or amount values, for example a profile of “threshold” values or “standard ranges” of values.

[2824] Accordingly, in embodiments in which the control profile is obtained from the same subject prior to treatment with an agent capable of inhibiting or reversing EMT or a chemotherapeutic agent, an increase in the activity, expression, or amount of one or more biomarker in the sample profile as compared with a control profile after contacting the subject with an agent capable of inhibiting or reversing EMT or a cancer therapeutic agent may be indicative of susceptibility to treatment with an agent capable of inhibiting or reversing EMT or a chemotherapeutic agent. In such embodiments, a decrease in the activity, expression, or amount of one or more biomarker in the sample profile as compared with a control profile after contacting the subject with a cancer therapeutic agent may be indicative of higher susceptibility to treatment with an agent capable of inhibiting or reversing EMT or a chemotherapeutic agent.

[2825] In some such embodiments, an increase in the activity, expression, or amount of one or more biomarker in the sample profile as compared with a control profile after contacting the subject with a cancer therapeutic agent may be indicative of lower susceptibility to treatment with an agent capable of inhibiting or reversing EMT or a chemotherapeutic agent. In some such embodiments, a decrease in the activity, expression, or amount of one or more biomarker in the sample profile as compared with a control profile after contacting the subject with a cancer therapeutic agent may be indicative of lower susceptibility to treatment with an agent capable of inhibiting or reversing EMT or a chemotherapeutic agent.

[2826] In some preferred embodiments the one or more biomarker includes at least Axl. In some embodiments the one or more biomarker is Axl. In some embodiments an increase in the activity, expression, or amount of Axl in the sample profile as compared with a control profile after contacting the subject with a cancer therapeutic agent is indicative of higher susceptibility to treatment with an agent capable of inhibiting or reversing EMT or a chemotherapeutic agent.

[2827] Subject

[2828] A “subject” as referred to herein is any species of animal classified as a mammal, and includes but is not restricted to, domestic and farm animals, primates and humans. In some preferred embodiments the subject is a human of any sex or race. In some embodiments, the human is an adult human.

[2829] In some embodiments of this aspect of the disclosure, the subject was selected for treatment with the agent capable of inhibiting or reversing EMT or a chemotherapeutic agent, using a predictive method according to the first aspect of this facet of the disclosure outlined above.

[2830] Agents Capable of Inhibiting or Reversing EMT

[2831] The present disclosure provides methods for predicting a cancer-related outcome in a subject having, suspected of having, or diagnosed with triple-negative breast cancer (TNBC). A “cancer-related outcome” is a clinical prediction or prognosis associated with cancer.

[2832] The agents capable of inhibiting or reversing EMT for use in this TNBC facet of the disclosure are defined as described above in the AML facet (see identically titled section above on page 14, line 19 to page 17, line 2).

[2833] In some preferred embodiments the further cancer treatment is a PD-1 inhibitor or PD-L1 inhibitor. In some embodiments the further cancer treatment is a monoclonal antibody such as pembrolizumab, alemtuzumab, bevacizumab, cetuximab, ibritumomab, tiuxetan, or rituximab. In some particularly preferred embodiments the further cancer treatment is pembrolizumab.

[2834] Assessing Biomarker Activity, Expression, Amount

[2835] In some embodiments of the predictive methods described herein, assessing the activity, expression, or amount of one or more biomarker in a subject, or in a sample derived from a subject, comprises: contacting a sample, or an extract from a sample, with at least 1, 2, 3, 4, 5, 6, 7, 8, 9, 10 or more reagents for detecting the activity, expression, or amount of one or more biomarkers, each of which is selective for a particular biomarker; and, detecting and/or quantifying said reagents for detecting.

[2836] In some preferred embodiments, assessing the expression or amount of the one or more biomarker comprises determining the level of the one or more biomarker protein or mRNA in the subject or sample derived from the subject. Preferably the expression or amount of the one or more biomarker is assessed by determining the level of protein expression. In particularly preferred embodiments the expression or amount of the one or more biomarker is assessed by determining the level of protein expression in serum.

[2837] The term “expression” refers to the transcription of a gene's DNA template to produce the corresponding mRNA and translation of this mRNA to produce the corresponding gene product (i.e., a peptide, polypeptide, or protein) as well as the “expression” of a protein in one or more forms that may have been modified post translation.

[2838] In some embodiments determining the level of the one or more biomarker protein or mRNA comprises: contacting a sample, or an extract from a sample, with at least 1, 2, 3, 4, 5, 6, 7, 8, 9, 10 or more specific binding members, each of which selectively binds to a respective biomarker protein or mRNA; and, detecting and/or quantifying formation of complex formed by said specific binding member and said biomarker protein or mRNA. In some embodiments the specific binding member may comprise an antibody molecule or a binding fragment thereof.

[2839] A range of suitable techniques for determining protein and mRNA expression levels are well known in the art, for example microarray analysis, Western blotting, and PCR techniques such as QPCR. In some embodiments, determining the expression or amount of the one or more biomarker protein or mRNA may comprise use of a technique selected from: Western blot; enzyme-linked immunosorbent assay (ELISA); radioimmunoassay (RIA); competitive enzyme immunoassay; double antibody sandwich ELISA (DAS-ELISA); liquid immunoarray technology; immunocytochemistry; immunohistochemistry; antibody microarray detection; precipitation of colloidal gold; affinity chromatography; ligand binding assay; and lectin binding assay.

[2840] In some embodiments, the expression or amount of the one or more biomarker is determined as an absolute amount of the respective biomarker protein or mRNA in the sample. In such cases, the respective biomarker protein or mRNA may be quantified in the sample and the amount expressed as a measure of the sample, for example the volume, mass, or total protein content of the sample.

[2841] In some embodiments, the expression or amount of the one or more biomarker is determined as a relative amount of the respective biomarker protein or mRNA in the sample, wherein the relative amount is determined relative to a reference protein or mRNA in the sample. Determining the relative amount of biomarker protein or mRNA in this way allows for normalisation to, e.g., account for differences in total protein concentration and to remove bias from sample to sample.

[2842] Preferably the reference protein or mRNA is one whose expression or amount does not vary significantly between subjects having cancer and subjects not having cancer, in particular TNBC. That is, the reference protein or mRNA is preferably one whose expression or amount is not altered by TNBC. Accordingly, the reference protein or mRNA may comprise one or more protein or mRNA which is not one of the biomarkers described herein. When expressing the expression or amount of the one or more biomarker as a relative amount, the absolute amount of the respective biomarker protein or mRNA in the sample may be divided by the absolute amount of the reference protein or mRNA in the sample.

[2843] Assessing Biomarker Expression at the RNA Level

[2844] Gene expression can be detected at the RNA level. RNA may be extracted from cells using RNA extraction techniques including, for example, using acid phenol/guanidine isothiocyanate extraction (RNAzol B; Biogenesis), RNeasy RNA preparation kits (Qiagen) or PAXgene (PreAnalytix, Switzerland). Typical assay formats utilising ribonucleic acid hybridisation include nuclear run-on assays, RT-PCR, RNase protection assays (Melton et al., Nuc. Acids Res. 12:7035), Northern blotting and In Situ hybridization. Gene expression can also be detected by microarray analysis as described below.

[2845] Assessing Biomarker Expression at the Protein Level

[2846] Preferably biomarker level is assessed by measuring protein expression. Altered gene or protein expression may also be detected by measuring the polypeptides encoded by the gene. This may be achieved by using molecules which bind to the polypeptides encoded by the biomarker gene. Suitable molecules/agents which bind either directly or indirectly to the polypeptides in order to detect the presence of the protein include naturally occurring molecules such as peptides and proteins, for example antibodies, or they may be synthetic molecules.

[2847] Antibodies may be derived from commercial sources or through techniques which are familiar to those skilled in the art. In one embodiment, and where altered expression manifests itself through the expression of alteration of post translationally-modified forms of a protein biomarker, antibodies specific for those different forms may be used. For the purposes of this disclosure, the term “antibody”, unless specified to the contrary, includes whole antibodies, or fragments of whole antibodies which retain their binding activity for a target antigen. Such fragments include Fv, F(ab′) and F(ab′)2 fragments, as well as single chain antibodies (scFv). Furthermore, the antibodies and fragments thereof may be humanised antibodies, for example as described in EP239400A. For example: monoclonal and polyclonal antibodies, recombinant antibodies, proteolytic and recombinant fragments of antibodies (Fab, Fv, scFv, diabodies), single-domain antibodies (VHH, sdAb, nanobodies, IgNAR, VNAR), and proteins unrelated to antibodies, which have been engineered to have antibody-like specific binding. Antibodies may be bound to a solid support and/or packaged into kits in a suitable container along with suitable reagents, controls, instructions and the like.

[2848] Arrays

[2849] Array technology and the various techniques and applications associated with it are well known in the art. Array technology overcomes the disadvantages with traditional methods in molecular biology, which generally work on a “one gene in one experiment” basis, resulting in low throughput and the inability to appreciate the “whole picture” of gene function. In the context of the products and methods of the present disclosure, array technology can be used, for example, in the analysis of the expression of biomarker proteins or mRNA.

[2850] In general, any library or group of samples may be arranged in an orderly manner into an array, by spatially separating the members of the library or group. Examples of suitable libraries for arraying include nucleic acid libraries (including DNA, cDNA, oligonucleotide, etc. libraries), peptide, polypeptide and protein libraries, as well as libraries comprising any molecules, such as ligand libraries, among others. Accordingly, where reference is made to a “library” in this document, unless the context dictates otherwise, such reference should be taken to include reference to a library in the form of an array.

[2851] Proteins, polypeptides, etc., may also be immobilised in arrays. For example, antibodies have been used in microarray analysis of the proteome using protein chips (Borrebaeck C A, 2000, Immunol Today 21(8):379-82). Polypeptide arrays are reviewed in, for example, MacBeath and Schreiber, 2000, Science, 289(5485):1760-1763.

[2852] Sample

[2853] Suitable samples include, but are not limited to, tissue samples such as tissue biopsy, blood, urine, buccal scrapes etc., as well as serum, plasma, or tissue culture supernatant samples. In preferred embodiments the expression or amount of the one or more biomarker is assessed by determining the level of protein expression in the sample. In some preferred embodiments the sample is a blood, serum, or plasma sample. In some particularly preferred embodiments the sample is a serum sample.

[2854] When assessing the expression or amount of the one or more biomarker proteins or mRNA in serum or plasma samples derived from a subject, samples are removed and subjected to analytical techniques such as flow cytometry, mass cytometry (CyTOF), ELISA, PET, and SELDI-TOF MS. In some embodiments, the method may comprise extracting RNA from said sample and detecting gene expression by QPCR. In some other embodiments, gene expression may be detected by detecting protein products by, for example, Western Blot.

[2855] In some embodiments, the level of expression of the one or more biomarker is assessed by determining the copy number of the gene encoding the one or more biomarker. Copy number (i.e. gene duplication events) may be determined using standard techniques known in the art, e.g. using a DNA chip as described in Jiang et al. (Jiang Q, Ho Y Y, Hao L, Nichols Berrios C, Chakravarti A. Copy number variants in candidate genes are genetic modifiers of Hirschsprung disease. PLoS One. 2011; 6(6)).

[2856] Is some preferred embodiments of the predictive methods described herein, the method is performed in vitro or ex vivo.

[2857] Methods of Selecting a Subject for Treatment

[2858] An third aspect of this facet of the present disclosure relates to methods of selecting subjects having, suspected of having, or diagnosed with triple-negative breast cancer (TNBC) for treatment with an agent capable of inhibiting or reversing EMT or a chemotherapeutic agent. In some embodiments the method comprises: identifying subjects susceptible to treatment with an agent capable of inhibiting or reversing EMT or a chemotherapeutic agent using a predictive method defined in accordance with the above described first and second aspects of this facet of the disclosure; and, selecting thus identified subjects for treatment.

[2859] In some embodiments this aspect relates to methods of selecting subjects having, suspected of having, or diagnosed with triple-negative breast cancer (TNBC) for continued treatment with an agent capable of inhibiting or reversing EMT or a chemotherapeutic agent. In some embodiments the method comprises: identifying subjects susceptible to treatment with an agent capable of inhibiting or reversing EMT or a chemotherapeutic agent using a predictive method defined in accordance with the above described second aspect of this facet of the disclosure; and, selecting thus identified subjects for treatment.

[2860] In some embodiments of this aspect of the disclosure, the treatment comprises administering to the subject a therapeutically effective amount of an agent capable of inhibiting or reversing EMT or a chemotherapeutic agent as described herein. Accordingly, in some embodiments the treatment comprises an Axl inhibitor, Akt3 inhibitor, Slfn11 inhibitor, or PHGDH inhibitor. In some preferred embodiments the treatment comprises an Axl inhibitor, for example, BGB324/R428/bemcentinib, cabozantinib, TP-0903, foretinib, merestinib, bosutinib, gilteritinib, crizotinib, amuvatinib, sunitinib, sitravatinib, LDC1267, or UNC2025. Other Axl inhibitors include the anti-Axl antibodies described in WO2015/193428, WO2015/193430, WO2016/097370, and WO2016/166296. In some preferred embodiments the Axl inhibitor is an anti-Axl antibody described in WO2015/193428, WO2015/193430, WO2016/097370, or WO2016/166296. In some particularly preferred embodiments the Axl inhibitor is BGB324/R428/bemcentinib.

[2861] In some other preferred embodiments, the treatment comprises an Akt3 inhibitor. In some embodiments the Akt3 inhibitor is an Akt3 inhibitor disclosed in WO2016/102672.

[2862] In some embodiments of this aspect of the disclosure, the treatment is administered as a single agent. In other embodiments, the treatment is administered in combination with a further cancer treatment. Suitable further cancer treatments are outlined in detail above. In some preferred embodiments the further cancer treatment is a PD-1 inhibitor or PD-L1 inhibitor. In some embodiments the further cancer treatment is a monoclonal antibody such as pembrolizumab, alemtuzumab, bevacizumab, cetuximab, ibritumomab, tiuxetan, or rituximab. In some particularly preferred embodiments the further cancer treatment is pembrolizumab.

[2863] Kits

[2864] A fourth aspect of this facet of the present disclosure relates to diagnostic kits and test devices. In some embodiments the disclosure provides a diagnostic kit comprising 1, 2, 3, 4, 5, 6, 7, 8, 9, 10 or more reagents for detecting the activity, expression, or amount of one or more of the biomarkers described herein, each of which is selective for a particular biomarker. In some embodiments each of the reagents for detecting is selective for a biomarker selected from the group consisting of: Axl, IL-6R beta, ICAM-1, MIP-1 beta, Periostin, IL-23, FOLR3, CLU, and/or FasL.

[2865] In other embodiments the disclosure provides a test device comprising 1, 2, 3, 4, 5, 6, 7, 8, 9, 10 or more reagents for detecting the activity, expression, or amount of one or more of the biomarkers described herein, each of which is selective for a particular biomarker. In some embodiments each of the reagents for detecting is selective for a biomarker selected from the group consisting of: Axl, IL-6R beta, ICAM-1, MIP-1 beta, Periostin, IL-23, FOLR3, CLU, and/or FasL.

[2866] In some embodiments the diagnostic kit or test device comprises 1, 2, 3, 4, 5, 6, 7, 8, 9, 10 or more specific binding members, each of which selectively binds to one of the biomarkers described herein; and, one or more reagents for detecting said one or more specific binding members, or one or more reagents for detecting and/or quantifying formation of a complex formed by said specific binding member and said biomarker. In some embodiments each specific binding member selectively binds to a biomarker selected from the group consisting of: Axl, IL-6R beta, ICAM-1, MIP-1 beta, Periostin, IL-23, FOLR3, CLU, and/or FasL.

[2867] In some embodiments the diagnostic kit or test device comprises a specific binding member which selectively binds to Axl, and at least 1, 2, 3, 4, 5, 6, 7, 8, 9, 10, or more specific binding members, each of which selectively binds to a biomarker selected from the group consisting of: IL-6R beta, ICAM-1, MIP-1 beta, Periostin, IL-23, FOLR3, CLU, and/or FasL.

[2868] In some embodiments of this aspect of the disclosure the diagnostic kit or test device comprises a plurality of said specific binding members provided in the form of an array on a substrate or conjugated to a plurality of particles, such as beads or microspheres. The particles may be encoded with a detectable label. In some embodiments the specific binding member comprises an antibody molecule or a binding fragment thereof.

[2869] In some embodiments of the diagnostic kit or test device detecting formation of a complex formed by a specific binding member and a biomarker is carried out by use of a technique selected from: Western blot; enzyme-linked immunosorbent assay (ELISA); radioimmunoassay (RIA); competitive enzyme immunoassay; double antibody sandwich ELISA (DAS-ELISA); liquid immunoarray technology; immunocytochemistry; immunohistochemistry; antibody microarray detection; precipitation of colloidal gold; affinity chromatography; ligand binding assay; and lectin binding assay.

[2870] In some embodiments of the diagnostic kit or test device, the kit or test device comprises no more than 15, 20, 25, 30, 40, or 50 reagents for detecting. In some embodiments of the diagnostic kit or test device, the kit or test device comprises no more than 15, 20, 25, 30, 40, or 50 specific binding members.

[2871] The present disclosure also provides use of such diagnostic kits and test devices in methods of predicting a cancer-related outcome in a subject. In preferred embodiments the cancer-related outcome is susceptibility to treatment with an agent capable of inhibiting or reversing EMT or a chemotherapeutic agent as described herein.

[2872] In some embodiments the agent capable of inhibiting or reversing EMT or chemotherapeutic agent is an Axl inhibitor, Akt3 inhibitor, Slfn11 inhibitor, or PHGDH inhibitor. In some preferred embodiments the agent capable of inhibiting or reversing EMT or chemotherapeutic agent is an Axl inhibitor, for example BGB324/R428/bemcentinib, cabozantinib, TP-0903, foretinib, merestinib, bosutinib, gilteritinib, crizotinib, amuvatinib, sunitinib, sitravatinib, LDC1267, or UNC2025. Other Axl inhibitors include the anti-Axl antibodies described in WO2015/193428, WO2015/193430, WO2016/097370, and WO2016/166296. In some preferred embodiments the Axl inhibitor is an anti-Axl antibody described in WO2015/193428, WO2015/193430, WO2016/097370, or WO2016/166296. In some particularly preferred embodiments the Axl inhibitor is BGB324/R428/bemcentinib.

[2873] In some embodiments of the diagnostic kit or test device for use in a predictive method, the subject has, is suspected of having, or has been diagnosed with TNBC.

[2874] In some embodiments the method may be as defined in accordance with the above described first and second aspects of this facet of the disclosure.

[2875] A fifth aspect of the present disclosure relates to the use of a reagent for detecting the activity, expression, or amount of a biomarker selected from the group consisting of: Axl, IL-6R beta, ICAM-1, MIP-1 beta, Periostin, IL-23, FOLR3, CLU, and/or FasL, in a method of predicting a cancer-related outcome in a subject.

[2876] A sixth aspect of this facet of the disclosure relates to the use of 1, 2, 3, 4, 5, 6, 7, 8, 9, 10 or more reagents for detecting the activity, expression, or amount a biomarker, each of which is selective for a particular biomarker selected from the group consisting of: Axl, IL-6R beta, ICAM-1, MIP-1 beta, Periostin, IL-23, FOLR3, CLU, and/or FasL, in a method of manufacture of a diagnostic kit or test device for use in a method of predicting a cancer-related outcome in a subject. In some embodiments of these uses the reagent for detecting comprises a specific binding member selective for a particular biomarker. The specific binding member may comprise an antibody molecule or a binding fragment thereof.

[2877] In some embodiments the method may be as defined in accordance with the above described first and second aspects of this facet of the disclosure.

[2878] Uses

[2879] A seventh aspect of this facet of the present disclosure relates to the use of one or more of: Axl, IL-6R beta, ICAM-1, MIP-1 beta, Periostin, IL-23, FOLR3, CLU, and/or FasL, as a biomarker for determining if a subject is susceptible to treatment with an agent capable of inhibiting or reversing EMT or a chemotherapeutic agent.

[2880] In some embodiments the use relates to use of Axl, and at least 1, 2, 3, 4, 5, 6, 7, 8, 9, 10, or more of: IL-6R beta, ICAM-1, MIP-1 beta, Periostin, IL-23, FOLR3, CLU, and/or FasL, as a biomarker for determining if a subject is susceptible to treatment with an agent capable of inhibiting or reversing EMT or a chemotherapeutic agent.

[2881] In some embodiments the use is as a biomarker in a method as defined in accordance with the above described first and second aspects of this facet of the disclosure.

[2882] Methods of Treating a Subject

[2883] A eighth aspect of this facet of the present disclosure relates to methods of treating a subject having, suspected of having, or diagnosed with triple-negative breast cancer (TNBC). In some embodiments the method comprises: identifying a subject for treatment using a predictive method defined in accordance with the above described first and second aspects of this facet of the disclosure; and, administering to the subject a therapeutically effective amount of an agent capable of inhibiting or reversing EMT or a chemotherapeutic agent.

[2884] Accordingly, in some embodiments, the method comprises: (a) obtaining a sample from the subject; (b) determining if the subject is susceptible to treatment with an agent capable of inhibiting or reversing EMT or a chemotherapeutic agent using a predictive method defined in accordance with the above described first and second aspects of this facet of the disclosure; and, (c) administering to the subject a therapeutically effective amount of an agent capable of inhibiting or reversing EMT or a chemotherapeutic agent.

[2885] In some embodiments the method comprises administering a therapeutically effective amount of an agent capable of inhibiting or reversing EMT or chemotherapeutic agent to a subject identified as susceptible to said treatment using a predictive method defined in accordance with the above described first and second aspects of this facet of the disclosure.

[2886] In other embodiments the method comprises: (a) administering to a subject a therapeutically effective amount of an agent capable of inhibiting or reversing EMT or a chemotherapeutic agent; and, (b) determining if the subject is susceptible to said treatment using a predictive method defined in accordance with the above described second aspect of this facet of the disclosure. In some embodiments the method further comprises: (c) administering to the subject one or more further therapeutically effective amounts of an agent capable of inhibiting or reversing EMT or a chemotherapeutic agent provided that the subject is identified as susceptible to said treatment.

[2887] A ninth aspect of this facet of the present disclosure relates to an agent capable of inhibiting or reversing EMT or chemotherapeutic agent for use in a method of treating a subject having, suspected of having, or diagnosed with triple-negative breast cancer (TNBC). In some embodiments the method of treatment is a method as defined above.

[2888] A tenth aspect of this facet of the present disclosure relates to use of an agent capable of inhibiting or reversing EMT or chemotherapeutic agent for use in a method of manufacture of a medicament for use in a method of treating a subject having, suspected of having, or diagnosed with triple-negative breast cancer (TNBC). In some embodiments the method of treatment is a method as defined above.

[2889] In some embodiments of these methods, agents for use, or uses, the agent capable of inhibiting or reversing EMT or chemotherapeutic agent comprises an Axl inhibitor, Akt3 inhibitor, Slfn11 inhibitor, or PHGDH inhibitor. In some preferred embodiments the agent capable of inhibiting or reversing EMT or chemotherapeutic agent is an Axl inhibitor, for example BGB324/R428/bemcentinib, cabozantinib, TP-0903, foretinib, merestinib, bosutinib, gilteritinib, crizotinib, amuvatinib, sunitinib, sitravatinib, LDC1267, or UNC2025. Other Axl inhibitors include the anti-Axl antibodies described in WO2015/193428, WO2015/193430, WO2016/097370, and WO2016/166296. In some preferred embodiments the Axl inhibitor is an anti-Axl antibody described in WO2015/193428, WO2015/193430, WO2016/097370, or WO2016/166296. In some particularly preferred embodiments the Axl inhibitor is BGB324/R428/bemcentinib.

[2890] In some other preferred embodiments, the treatment comprises an Akt3 inhibitor. In some embodiments the Akt3 inhibitor is an Akt3 inhibitor disclosed in WO2016/102672.

[2891] In some embodiments of these methods, agents for use, or uses, the treatment is administered as a single agent. In other embodiments, the treatment is administered in combination with a further cancer treatment. Suitable further cancer treatments are outlined in detail above. In some preferred embodiments the further cancer treatment is a PD-1 inhibitor or PD-L1 inhibitor. In some embodiments the further cancer treatment is a monoclonal antibody such as pembrolizumab, alemtuzumab, bevacizumab, cetuximab, ibritumomab, tiuxetan, or rituximab. In some particularly preferred embodiments the further cancer treatment is pembrolizumab.

[2892] Statements of Disclosure

[2893] The following numbered statements relate to aspects of this facet of the present disclosure, and form part of the description:
[2894] 101. A method of predicting a cancer-related outcome in a subject, the method comprising assessing the activity, expression, or amount of one or more biomarker in the subject, or in a sample derived from the subject;
   [2895] wherein the one or more biomarker is selected from the group consisting of: Axl, IL-6R beta, ICAM-1, MIP-1 beta, Periostin, IL-23, FOLR3, CLU, and/or FasL; and
   [2896] wherein the subject has, is suspected of having, or has been diagnosed with triple-negative breast cancer (TNBC).
[2897] 102. A method according to statement 101, wherein the method comprises:
   [2898] assessing the activity, expression, or amount of one or more biomarker in the subject, or in a sample derived from the subject, to obtain a sample profile of the one or more biomarker; and
   [2899] making a prediction based on the sample profile of the one or more biomarker.
[2900] 103. A method according to statement 102, wherein the prediction is made by comparing the sample profile to a control profile.
[2901] 104. A method according to statement 103, wherein the sample profile is obtained before the subject is contacted with or administered an agent capable of inhibiting or reversing EMT or a chemotherapeutic agent.
[2902] 105. A method according to statement 104, wherein the control profile is:
   [2903] (i) obtained from a population of control subjects having TNBC; or
   [2904] (ii) obtained from a control subject or population of control subjects having TNBC and previously found to lack susceptibility to treatment with an agent capable of inhibiting or reversing EMT or a chemotherapeutic agent (that is, non-responder subjects);
   [2905] (iii) a predetermined profile of biomarker expression, activity, or amount values, for example a profile of “average, median, or mean” values or “standard ranges” of values, obtained from a control subject or population of control subjects having TNBC and previously found to lack susceptibility to treatment with an agent capable of inhibiting or reversing EMT or a chemotherapeutic agent (that is, non-responder subjects);
   [2906] (iv) obtained from a control sample having a known “average, median, or mean” value of biomarkers indicative of a control subject or population of control subjects having TNBC and previously found to lack susceptibility to treatment with an agent capable of inhibiting or reversing EMT or a chemotherapeutic agent (that is, non-responder subjects);
   [2907] (v) a predetermined profile of biomarker expression, activity, or amount “threshold” values obtained from a control subject or population of control subjects having TNBC and previously found to be susceptible to treatment with an agent capable of inhibiting or reversing EMT or a chemotherapeutic agent (that is, responder subjects); or
   [2908] (vi) obtained from a control sample having a known “threshold” value of biomarkers indicative of a control subject or population of control subjects having TNBC and previously found to be susceptible to treatment with an agent capable of inhibiting or reversing EMT or a chemotherapeutic agent (that is, responder subjects).
[2909] 106. A method according to statement 105, wherein a higher activity, expression, or amount of one or more biomarker in the sample profile as compared with the control profile is indicative of susceptibility to treatment with an agent capable of inhibiting or reversing EMT or a chemotherapeutic agent.
[2910] 107. A method according to statement 105, wherein a lower activity, expression, or amount of one or more biomarker in the sample profile as compared with the control profile is indicative of susceptibility to treatment with an agent capable of inhibiting or reversing EMT or a chemotherapeutic agent.
[2911] 108. A method according to any one of statements 105-107, wherein the one or more biomarker includes at least one of: IL-23, FOLR3, CLU, and/or FasL,
   [2912] and wherein a higher activity, expression, or amount of one or more of said biomarkers in the sample profile as compared with the control profile is indicative of susceptibility to treatment with an agent capable of inhibiting or reversing EMT or a chemotherapeutic agent.
[2913] 109. A method according to any one of statements 105-108, wherein the one or more biomarker includes at least one of: Axl, IL-6R beta, ICAM-1, MIP-1 beta, and/or Periostin,
   [2914] and wherein a lower activity, expression, or amount of one or more of said biomarkers in the sample profile as compared with the control profile is indicative of susceptibility to treatment with an agent capable of inhibiting or reversing EMT or a chemotherapeutic agent.
[2915] 110. A method according to any one of statements 105-109, wherein:
   [2916] a lower activity, expression, or amount of Axl; and/or
   [2917] a lower activity, expression, or amount of IL-6R beta; and/or
   [2918] a lower activity, expression, or amount of ICAM-1; and/or
   [2919] a lower activity, expression, or amount of MIP-1 beta; and/or
   [2920] a lower activity, expression, or amount of Periostin; and/or
   [2921] a higher activity, expression, or amount of IL-23; and/or
   [2922] a higher activity, expression, or amount of FOLR3; and/or
   [2923] a higher activity, expression, or amount of CLU; and/or
   [2924] a higher activity, expression, or amount of FasL;
   [2925] in the sample profile as compared with the control profile is indicative of susceptibility to treatment with an agent capable of inhibiting or reversing EMT or a chemotherapeutic agent.
[2926] 111. A method according to any one of statements 101-110, wherein the one or more biomarker comprises Axl,
   [2927] optionally wherein the one or more biomarker comprises Axl and at least 1, 2, 3, 4, 5, 6, 7, 8, 9, 10, or more further biomarkers selected from: IL-6R beta, ICAM-1, MIP-1 beta, Periostin, IL-23, FOLR3, CLU, and/or FasL.
[2928] 112. A method according to any one of statements 101-111, wherein:
   [2929] said Axl biomarker comprises an amino acid sequence having at least 70%, 80%, 90%, 95%, 99% or 100% sequence identity with the full-length of the amino acid sequence disclosed at UniProt accession no: P30530-1 or P30530-2 (entry version 196) or a fragment thereof;
   [2930] said Interleukin-6 receptor subunit beta (IL-6R beta) biomarker comprises an amino acid sequence having at least 70%, 80%, 90%, 95%, 99% or 100% sequence identity with the full-length of the amino acid sequence disclosed at UniProt accession no: P40189-1 or P40189-2 (entry version 209) or a fragment thereof;
   [2931] said Intercellular Adhesion Molecule 1 (ICAM-1) biomarker comprises an amino acid sequence having at least 70%, 80%, 90%, 95%, 99% or 100% sequence identity with the full-length of the amino acid sequence disclosed at UniProt accession no: P05362 (entry version 221) or a fragment thereof;
   [2932] said Macrophage Inflammatory Protein-1 beta (MIP-1 beta) biomarker comprises an amino acid sequence having at least 70%, 80%, 90%, 95%, 99% or 100% sequence identity with the full-length of the amino acid sequence disclosed at UniProt accession no: P13236 (entry version 187) or a fragment thereof;
   [2933] said Periostin biomarker comprises an amino acid sequence having at least 70%, 80%, 90%, 95%, 99% or 100% sequence identity with the full-length of the amino acid sequence disclosed at UniProt accession no: Q15063-1, Q15063-2, Q15063-3, Q15063-4, Q15063-5, Q15063-6, Q15063-7 (entry version 160) or a fragment thereof;
   [2934] said Interleukin-23 (IL-23) biomarker comprises an amino acid sequence having at least 70%, 80%, 90%, 95%, 99% or 100% sequence identity with the full-length of the amino acid sequence disclosed at UniProt accession no: Q9NPF7 (entry version 133) or a fragment thereof;
   [2935] said Folate receptor gamma (FOLR3) biomarker comprises an amino acid sequence having at least 70%, 80%, 90%, 95%, 99% or 100% sequence identity with the full-length of the amino acid sequence disclosed at UniProt accession no: P41439-1, P41439-2, or P41439-3 (entry version 127) or a fragment thereof;
   [2936] said Clusterin (CLU) biomarker comprises an amino acid sequence having at least 70%, 80%, 90%, 95%, 99% or 100% sequence identity with the full-length of the amino acid sequence disclosed at UniProt accession no: P10909-1, P10909-2, P10909-3, P10909-4, or P10909-5 (entry version 209) or a fragment thereof; and/or
   [2937] said Fas Ligand (FasL) biomarker comprises an amino acid sequence having at least 70%, 80%, 90%, 95%, 99% or 100% sequence identity with the full-length of the amino acid sequence disclosed at UniProt accession no: P48023-1 or P48023-2 (entry version 197) or a fragment thereof;
   [2938] or a nucleic acid (either DNA or RNA) having at least 70%, 80%, 90%, 95%, 99% or 100% sequence identity with the full-length nucleic acid sequence encoding said amino acid sequences.
[2939] 113. A method according to any one of statement 101-112, wherein the method comprises determining the amount of at least 2, 3, 4, 5, 6, 7, 8, 9, 10, 11, 12, 13, 14, 15, 20 of said biomarkers in the subject, or sample derived from the subject.
[2940] 114. A method according to any one of statements 104-113, wherein assessing the activity, expression, or amount of one or more biomarker in the subject, or in a sample derived from the subject, comprises:
   [2941] contacting a sample, or an extract from the sample, with at least 1, 2, 3, 4, 5, 6, 7, 8, 9, 10 or more reagents for detecting the activity, expression, or amount of one or more biomarkers, each of which is selective for a particular biomarker; and
   [2942] detecting and/or quantifying said reagents for detecting.
[2943] 115. A method according to statement 114, wherein assessing the expression or amount of one or more biomarker in the subject, or in a sample derived from the subject, comprises:
   [2944] contacting a sample, or an extract from the sample, with at least 1, 2, 3, 4, 5, 6, 7, 8, 9, 10 or more specific binding members, each of which selectively binds to a respective biomarker protein or mRNA; and
   [2945] detecting and/or quantifying formation of complex formed by said specific binding member and said biomarker protein or mRNA.
[2946] 116. A method according to statement 115 wherein the specific binding member comprises an antibody molecule or binding fragment thereof.
[2947] 117. A method according to statement 115 or 116, wherein detecting formation of a complex formed by the specific binding member and the biomarker protein or mRNA is carried out by use of a technique selected from: Western blot; enzyme-linked immunosorbent assay (ELISA); radioimmunoassay (RIA); competitive enzyme immunoassay; double antibody sandwich ELISA (DAS-ELISA); liquid immunoarray technology; immunocytochemistry; immunohistochemistry; antibody microarray detection; precipitation of colloidal gold; affinity chromatography; ligand binding assay; and lectin binding assay.
[2948] 118. A method according to any one of statements 115-117 wherein the expression or amount of the one or more biomarker is determined as the absolute amount of the respective biomarker protein or mRNA in the sample.
[2949] 119. A method according to any one of statements 115-117 wherein the expression or amount of the one or more biomarker is determined as a relative amount of the respective biomarker protein or mRNA in the sample,
   [2950] optionally wherein the relative amount is determined relative to a reference protein or mRNA in the sample, the expression of which is not altered by TNBC.
[2951] 120. A method according to any one of statements 101-119, wherein the cancer-related outcome is susceptibility to treatment with an agent capable of inhibiting or reversing EMT or a chemotherapeutic agent.
[2952] 121. A method according to statement 120, wherein the agent capable of inhibiting or reversing EMT or chemotherapeutic agent is an Axl inhibitor, Akt3 inhibitor, Slfn11 inhibitor, or PHGDH inhibitor.
[2953] 122. A method according to statement 121, wherein the agent capable of inhibiting or reversing EMT or chemotherapeutic agent is an Axl inhibitor.
[2954] 123. A method according to statement 122, wherein the Axl inhibitor is BGB324/R428/bemcentinib, cabozantinib, TP-0903, foretinib, merestinib, bosutinib, gilteritinib, crizotinib, amuvatinib, sunitinib, sitravatinib, LDC1267, UNC2025, or an anti-Axl antibody described in WO2015/193428, WO2015/193430, WO2016/097370, or WO2016/166296.
[2955] 124. A method according to statement 123, wherein the Axl inhibitor is BGB324/R428/bemcentinib.
[2956] 125. A method according to statement 123, wherein the Axl inhibitor is an anti-Axl antibody described in WO2015/193428, WO2015/193430, WO2016/097370, or WO2016/166296.
[2957] 126. A method according to statement 121, wherein the agent capable of inhibiting or reversing EMT or chemotherapeutic agent is an Akt3 inhibitor.
[2958] 127. A method according to statement 126, wherein the Akt3 inhibitor is an Akt3 inhibitor disclosed in WO2016/102672.
[2959] 128. A method according to any one of statements 120-127, wherein the agent capable of inhibiting or reversing EMT is administered as a single agent.
[2960] 129. A method according to any one of statements 120-127, wherein the agent capable of inhibiting or reversing EMT is administered in combination with a further cancer treatment.
[2961] 130. A method according to statement 129, wherein the further cancer treatment is selected from:
   [2962] (i) alkylating agents, including alkyl sulfonates such as busulfan;
   [2963] (ii) nitrogen mustards such as chlorambucil, cyclophosphamide, estramustine, ifosfamide, mechlorethamine, melphalan, and uramustine;
   [2964] (iii) ethyleneimine derivatives such as thiotepa;
   [2965] (iv) nitrosoureas such as carmustine, lomustine, and streptozocin;
   [2966] (v) triazenes such as dacarbazine, procarbazine, and temozolamide;
   [2967] (vi) platinum compounds such as cisplatin, carboplatin, oxaliplatin, satraplatin, and picoplatin onnaplatin, tetraplatin, sprioplatin, iproplatin, chloro(diethylenediamino)-platinum (II) chloride, dichloro(ethylenediamino)-platinum (II), diamino(2-ethylmalonato)platinum (II), (1,2-diaminocyclohexane)malonatoplatinum (II), (4-carboxyphthalo)-(1,2-diaminocyclohexane)platinum (II), (1,2-diaminocyclohexane)-(isocitrato)platinum (II), and (1,2-diaminocyclohexane)-cis-(pyruvato)platinum (II);
   [2968] (vii) antimetabolites, including antifolates such as methotrexate, permetrexed, raltitrexed, and trimetrexate;
   [2969] (viii) pyrimidine analogues such as azacitidine, capecitabine, cytarabine, edatrexate, floxuridine, fluorouracil, gemcitabine, and troxacitabine;
   [2970] (ix) purine analogues such as cladribine, chlorodeoxyadenosine, clofarabine, fludarabine, mercaptopurine, pentostatin, and thioguanine;
   [2971] (x) natural products, including antitumor antibiotics such as bleomycin, dactinomycin, mithramycin, mitomycin, mitoxantrone, porfiromycin;
   [2972] (xi) anthracyclines such as daunorubicin, doxorubicin, epirubicin, idarubicin, and valrubicin;
   [2973] (xii) mitotic inhibitors such as the vinca alkaloids vinblastine, vinvesir, vincristine, vindesine, and vinorelbine;
   [2974] (xiii) enzymes such as L-asparaginase and PEG-L-asparaginase;
   [2975] (xiv) microtubule polymer stabilizers such as the taxanes paclitaxel and docetaxel;
   [2976] (xv) topoisomerase I inhibitors such as the camptothecins irinotecan and topotecan;
   [2977] (xvi) topoisomerase II inhibitors such as podophyllotoxin, amsacrine, etoposide, teniposide, losoxantrone and actinomycin;
   [2978] (xvii) hormones and hormone antagonists, including
      [2979] androgens such as fluoxymesterone and testolactone;
      [2980] antiandrogens such as bicalutamide, cyproterone, flutamide, and nilutamide;
      [2981] corticosteroids such as dexamethasone and prednisone;
      [2982] aromatase inhibitors such as aminoglutethimide, anastrozole, exemestane, formestane, and letrozole;
      [2983] estrogens such as diethylstilbestrol;
      [2984] antiestrogens such as fulvestrant, raloxifene, tamoxifen, and toremifine;
      [2985] luteinising hormone-releasing hormone (LHRH) agonists and antagonists such as abarelix, buserelin, goserelin, leuprolide, histrelin, desorelin, nafarelin acetate and triptorelin;
      [2986] progestins such as medroxyprogesterone acetate and megestrol acetate; and
      [2987] thyroid hormones such as levothyroxine and liothyronine;
   [2988] (xviii) PKB pathway inhibitors, including perifosine, enzastaurin hydrochloride, and triciribine;
   [2989] (xix) P13K inhibitors such as semaphore and SF1126, and MTOR inhibitors such as rapamycin and analogues;
   [2990] (xx) CDK inhibitors, including seliciclib, alvocidib, and 7-hydroxystaurosporine;
   [2991] (xxi) COX-2 inhibitors, including celecoxib;
   [2992] (xxii) HDAC inhibitiors, including trichostatin A, suberoylanilide hydroxamic acid, and chlamydocin;
   [2993] (xxiii) DNA methylase inhibitors, including temozolomide, and miscellaneous agents, including altretamine, arsenic trioxide, thalidomide, lenalidomide, gallium nitrate, levamisole, mitotane, hydroxyurea, octreotide, procarbazine, suramin, photodynamic compounds such as methoxsalen and sodium porfimer;
   [2994] (xxiv) proteasome inhibitors such as bortezomib;
   [2995] (xxv) molecular targeted therapy agents including: functional therapeutic agents, including gene therapy agents and antisense therapy agents;
   [2996] (xxvi) tyrosine kinase inhibitors such as erlotinib hydrochloride, gefitinib, imatinib mesylate, and semaxanib;
   [2997] (xxvii) Raf inhibitors such as sorafenib, and gene expression modulators such as the retinoids and rexinoids, for example adapalene, bexarotene, trans-retinoic acid, 9-cis-retinoic acid, and N-(4-hydroxyphenyl)retinamide;
   [2998] (xxviii) phenotype-directed therapy agents, including monoclonal antibodies such as pembrolizumab, alemtuzumab, bevacizumab, cetuximab, ibritumomab tiuxetan, rituximab, and trastuzumab, immunotoxins such as gemtuzumab ozogamicin, radioimmunoconjugates such as I-tositumobab;
   [2999] (xxix) cancer vaccines;
   [3000] (xxx) biologic therapy agents including: interferons such as interferon-[alpha]2a and interferon-[alpha]2b, and interleukins such as aldesleukin, denileukin diftitox, and oprelvekin; (xxxi) anticancer therapies involving the use of protective or adjunctive agents, including: cytoprotective agents such as amifostine, and dexrazoxane, phosphonates such as pamidronate and zoledronic acid, and stimulating factors such as epoetin, darbeopetin, filgrastim, PEG-filgrastim, and sargramostim;
   [3001] (xxxii) Axl inhibitors such as 1-(6,7-dihydro-5H-benzo[6,7]cyclohepta[1,2-c]pyridazin-3-yl)-N3-((7-(S)-pyrrolidin-1-yl)-6,7,8,9-tetrahydro-5H-benzo[7]annulene-2-yl)-1H-1,2,4-triazole-3,5-diamine; and/or
   [3002] (xxxiii) further combination chemotherapeutic regimens, such as combinations of carboplatin/paclitaxel, capecitabine/docetaxel, fluorauracil/levamisole, fluorauracil/leucovorin, methotrexate/leucovorin, and trastuzumab/paclitaxel, alone or in further combination with carboplatin.
[3003] 131. A method according to statement 129, wherein the further cancer treatment is a PD-1 inhibitor or PD-L1 inhibitor.
[3004] 132. A method according to statement 129, wherein the further cancer treatment is a monoclonal antibody such as pembrolizumab, alemtuzumab, bevacizumab, cetuximab, ibritumomab, tiuxetan, or rituximab.
[3005] 133. A method according to statement 131 or 132, wherein the further cancer treatment is pembrolizumab.
[3006] 134. A method according to any one of statements 101-133, wherein the subject is mammalian.
[3007] 135. A method according to statement 134, wherein the subject is human.
[3008] 136. A method according to any one of statements 101-135, wherein the predictive method is performed before the subject receives a treatment or course of treatment for TNBC.
[3009] 137. A method according to any one of statement 101-136, wherein the predictive method is performed during or after a treatment or course of treatment for TNBC.
[3010] 138. A method according to any one of statements 101-135 or 137, wherein the subject has previously been treated with an agent capable of inhibiting or reversing EMT or a chemotherapeutic agent.
[3011] 139. A method according to statement 138, wherein the subject has previously been treated with an agent selected from: a PHGDH inhibitor, a Slfn11 inhibitor, an Axl inhibitor, or an Akt3 inhibitor.
[3012] 140. A method according to any one of statements 138-139, wherein the subject has previously been treated with an agent that is different to the agent capable of inhibiting or reversing EMT or chemotherapeutic agent for which the subject's susceptibility is being predicted.
[3013] 141. A method according to any one of statements 101-136, wherein the subject has not previously been treated with an agent capable of inhibiting or reversing EMT or a chemotherapeutic agent.
[3014] 142. A method according to statement 141, wherein the subject has not previously been treated with an Axl inhibitor.
[3015] 143. A method according to statement 141, wherein the subject has not previously been treated with an Akt3 inhibitor.
[3016] 144. A method according to any one of statements 101-143, wherein the sample is selected from: blood, serum, plasma, tissue biopsy, culture supernatant, or urine.
[3017] 145. A method according to statement 144, wherein the sample is a blood, serum, or plasma sample.
[3018] 146. A method according to statement 145, wherein the sample is a serum sample.
[3019] 147. A method according to any one of statements 104-146, wherein the method further comprises a subsequent step of assessing the activity, expression, or amount of one or more biomarker in the subject, in which a sample profile is obtained after contacting the subject with an agent capable of inhibiting or reversing EMT or a chemotherapeutic agent.
[3020] 148. A method according to statement 103, wherein the sample profile is obtained after contacting the subject with an agent capable of inhibiting or reversing EMT or a chemotherapeutic agent.
[3021] 149. A method according to statement 147 or 148, wherein the control profile is obtained from the same subject prior to contacting said subject with the agent capable of inhibiting or reversing EMT or a chemotherapeutic agent.
[3022] 150. A method according to statement 149, wherein an increase in the activity, expression, or amount of one or more biomarker in the sample profile as compared with the control profile is indicative of higher susceptibility to treatment with an agent capable of inhibiting or reversing EMT or a chemotherapeutic agent.
[3023] 151. A method according to statement 149, wherein a decrease in the activity, expression, or amount of one or more biomarker in the sample profile as compared with the control profile is indicative of higher susceptibility to treatment with an agent capable of inhibiting or reversing EMT or a chemotherapeutic agent.
[3024] 152. A method according to statement 149, wherein an increase in the activity, expression, or amount of one or more biomarker in the sample profile as compared with the control profile is indicative of lower susceptibility to treatment with an agent capable of inhibiting or reversing EMT or a chemotherapeutic agent.
[3025] 153. A method according to statement 149, wherein a decrease in the activity, expression, or amount of one or more biomarker in the sample profile as compared with the control profile is indicative of lower susceptibility to treatment with an agent capable of inhibiting or reversing EMT or a chemotherapeutic agent.
[3026] 154. A method according to statement 150, wherein the one or more biomarker includes at least Axl.
[3027] 155. A method according to any one of statements 147-154, wherein assessing the activity, expression, or amount of one or more biomarker in the subject, or in a sample derived from the subject, comprises:
   [3028] contacting a sample, or an extract from the sample, with at least 1, 2, 3, 4, 5, 6, 7, 8, 9, 10 or more reagents for detecting the activity, expression, or amount of one or more biomarkers, each of which is selective for a particular biomarker; and
   [3029] detecting and/or quantifying said reagents for detecting.
[3030] 156. A method according to statement 155, wherein assessing the expression or amount of one or more biomarker in the subject, or in a sample derived from the subject, comprises:
   [3031] contacting a sample, or an extract from the sample, with at least 1, 2, 3, 4, 5, 6, 7, 8, 9, 10 or more specific binding members, each of which selectively binds to a respective biomarker protein or mRNA; and
   [3032] detecting and/or quantifying formation of a complex formed by said specific binding member and said biomarker protein or mRNA.
[3033] 157. A method according to statement 156, wherein the specific binding member comprises an antibody molecule or binding fragment thereof.
[3034] 158. A method according to statement 156 or 157, wherein detecting formation of a complex formed by the specific binding member and the biomarker protein or mRNA is carried out by use of a technique selected from: Western blot; enzyme-linked immunosorbent assay (ELISA); radioimmunoassay (RIA); competitive enzyme immunoassay; double antibody sandwich ELISA (DAS-ELISA); liquid immunoarray technology; immunocytochemistry; immunohistochemistry; antibody microarray detection; precipitation of colloidal gold; affinity chromatography; ligand binding assay; and lectin binding assay.
[3035] 159. A method according to any one of statements 156-158 wherein the expression or amount of the one or more biomarker is determined as the absolute amount of the respective biomarker protein or mRNA in the sample.
[3036] 160. A method according to any one of statements 156-158 wherein the expression or amount of the one or more biomarker is determined as a relative amount of the respective biomarker protein or mRNA in the sample,
   [3037] optionally wherein the relative amount is determined relative to a reference protein or mRNA in the sample, the expression of which is not altered by TNBC.
[3038] 161. A method according to any one of statements 148-160, wherein the agent capable of inhibiting or reversing EMT or chemotherapeutic agent is an Axl inhibitor, Akt3 inhibitor, Slfn11 inhibitor, or PHGDH inhibitor.
[3039] 162. A method according to statement 161, wherein the agent capable of inhibiting or reversing EMT or chemotherapeutic agent is an Axl inhibitor.
[3040] 163. A method according to statement 162, wherein the Axl inhibitor is BGB324/R428/bemcentinib, cabozantinib, TP-0903, foretinib, merestinib, bosutinib, gilteritinib, crizotinib, amuvatinib, sunitinib, sitravatinib, LDC1267, UNC2025, or an anti-Axl antibody described in WO2015/193428, WO2015/193430, WO2016/097370, or WO2016/166296.
[3041] 164. A method according to statement 163, wherein the Axl inhibitor is BGB324/R428/bemcentinib.
[3042] 165. A method according to statement 163, wherein the Axl inhibitor is an anti-Axl antibody described in WO2015/193428, WO2015/193430, WO2016/097370, or WO2016/166296.
[3043] 166. A method according to statement 161, wherein the agent capable of inhibiting or reversing EMT or chemotherapeutic agent is an Akt3 inhibitor.
[3044] 167. A method according to statement 166, wherein the Akt3 inhibitor is an Akt3 inhibitor disclosed in WO2016/102672.
[3045] 168. A method according to any one of statements 161-167, wherein the agent capable of inhibiting or reversing EMT is administered as a single agent.
[3046] 169. A method according to any one of statements 161-167, wherein the agent capable of inhibiting or reversing EMT is administered in combination with a further cancer treatment.
[3047] 170. A method according to statement 169, wherein the further cancer treatment is selected from the further cancer treatments listed in statement 130.
[3048] 171. A method according to statement 169, wherein the further cancer treatment is a PD-1 inhibitor or PD-L1 inhibitor.
[3049] 172. A method according to statement 169, wherein the further cancer treatment is a monoclonal antibody such as pembrolizumab, alemtuzumab, bevacizumab, cetuximab, ibritumomab, tiuxetan, or rituximab.
[3050] 173. A method according to statement 171 or 172, wherein the further cancer treatment is pembrolizumab.
[3051] 174. A method according to any one of statements 148-173, wherein the subject is mammalian.
[3052] 175. A method according to statement 174, wherein the subject is human.
[3053] 176. A method according to any one of statements 148-175, wherein the subject was selected for treatment with the agent capable of inhibiting or reversing EMT or a chemotherapeutic agent, using a predictive method according to any one of statements 101-147.
[3054] 177. A method according to any one of statements 148-176, wherein the sample is selected from: blood, serum, plasma, tissue biopsy, culture supernatant, or urine.
[3055] 178. A method according to statement 177, wherein the sample is a blood, serum, or plasma sample.
[3056] 179. A method according to statement 178, wherein the sample is a serum sample.
[3057] 180. A method according to any one of statements 1-179, wherein the method is performed in vitro or ex vivo.
[3058] 201. A method of selecting subjects having, suspected of having, or diagnosed with triple-negative breast cancer (TN BC) for treatment with an agent capable of inhibiting or reversing EMT or a chemotherapeutic agent, the method comprising:
   [3059] identifying subjects susceptible to treatment with an agent capable of inhibiting or reversing EMT or a chemotherapeutic agent using a method according to any one of statements 101-180; and
   [3060] selecting thus identified subjects for treatment.
[3061] 202. A method of selecting subjects having, suspected of having, or diagnosed with triple-negative breast cancer (TNBC) for continued treatment with an agent capable of inhibiting or reversing EMT or a chemotherapeutic agent, the method comprising:
   [3062] identifying subjects susceptible to treatment with an agent capable of inhibiting or reversing EMT or a chemotherapeutic agent using a method according to any one of statements 148-180; and
   [3063] selecting thus identified subjects for treatment.
[3064] 203. A method according to any one of statements 201-202, wherein treatment comprises administering to the subject a therapeutically effective amount of an agent capable of inhibiting or reversing EMT or a chemotherapeutic agent.
[3065] 204. A method according to statement 203, wherein the treatment comprises an Axl inhibitor, Akt3 inhibitor, Slfn11 inhibitor, or PHGDH inhibitor.
[3066] 205. A method according to statement 204, wherein the treatment comprises an Axl inhibitor.
[3067] 206. A method according to statement 205, wherein the Axl inhibitor is BGB324/R428/bemcentinib, cabozantinib, TP-0903, foretinib, merestinib, bosutinib, gilteritinib, crizotinib, amuvatinib, sunitinib, sitravatinib, LDC1267, UNC2025, or an anti-Axl antibody described in WO2015/193428, WO2015/193430, WO2016/097370, or WO2016/166296.
[3068] 207. A method according to statement 206, wherein the Axl inhibitor is BGB324/R428/bemcentinib.
[3069] 208. A method according to statement 206, wherein the Axl inhibitor is an anti-Axl antibody described in WO2015/193428, WO2015/193430, WO2016/097370, or WO2016/166296.
[3070] 209. A method according to statement 204, wherein the treatment comprises an Akt3 inhibitor.
[3071] 210. A method according to statement 209, wherein the Akt3 inhibitor is an Akt3 inhibitor disclosed in WO2016/102672.
[3072] 211. A method according to any one of statements 203-210, wherein the treatment is administered as a single agent.
[3073] 212. A method according to any one of statements 203-211, wherein the treatment is administered in combination with a further cancer treatment.
[3074] 213. A method according to statement 212, wherein the further cancer treatment is selected from the further cancer treatments listed in statement 130.
[3075] 214. A method according to statement 212, wherein the further cancer treatment is a PD-1 inhibitor or PD-L1 inhibitor.
[3076] 215. A method according to statement 212, wherein the further cancer treatment is a monoclonal antibody such as pembrolizumab, alemtuzumab, bevacizumab, cetuximab, ibritumomab, tiuxetan, or rituximab.
[3077] 216. A method according to statement 214 or 215, wherein the further cancer treatment is pembrolizumab.
[3078] 301. A diagnostic kit comprising 1, 2, 3, 4, 5, 6, 7, 8, 9, 10 or more reagents for detecting the activity, expression, or amount of one or more biomarkers, each of which is selective for a particular biomarker selected from the group consisting of: Axl, IL-6R beta, ICAM-1, MIP-1 beta, Periostin, IL-23, FOLR3, CLU, and/or FasL.
[3079] 302. A test device comprising 1, 2, 3, 4, 5, 6, 7, 8, 9, 10 or more reagents for detecting the activity, expression, or amount of one or more biomarkers, each of which is selective for a particular biomarker selected from the group consisting of: Axl, IL-6R beta, ICAM-1, MIP-1 beta, Periostin, IL-23, FOLR3, CLU, and/or FasL.
[3080] 303. A diagnostic kit or test device according to any one of statements 301 or 302, comprising:
   [3081] 1, 2, 3, 4, 5, 6, 7, 8, 9, 10 or more specific binding members, each of which selectively binds to a biomarker selected from the group consisting of: Axl, IL-6R beta, ICAM-1, MIP-1 beta, Periostin, IL-23, FOLR3, CLU, and/or FasL; and
   [3082] one or more reagents for detecting said one or more specific binding members or one or more reagents for detecting and/or quantifying formation of a complex formed by said specific binding member and said biomarker.
[3083] 304. A diagnostic kit or test device according to statement 303, wherein the specific binding member comprises an antibody molecule or binding fragment thereof.
[3084] 305. A diagnostic kit or test device according to statement 303 or 304, wherein detecting formation of a complex formed by the specific binding member and the biomarker is carried out by use of a technique selected from: Western blot; enzyme-linked immunosorbent assay (ELISA); radioimmunoassay (RIA); competitive enzyme immunoassay; double antibody sandwich ELISA (DAS-ELISA); liquid immunoarray technology; immunocytochemistry; immunohistochemistry; antibody microarray detection; precipitation of colloidal gold; affinity chromatography; ligand binding assay; and lectin binding assay.
[3085] 306. A diagnostic kit or test device according to any one of statements 301-305, wherein the kit or test device comprises no more than 15, 20, 25, 30, 40, or 50 reagents for detecting.
[3086] 307. A diagnostic kit or test device according to any one of statements 301-306 for use in a method of predicting a cancer-related outcome in a subject.
[3087] 308. A diagnostic kit for use, or test device for use, according to statement 307, wherein the cancer-related outcome is susceptibility to treatment with an agent capable of inhibiting or reversing EMT or a chemotherapeutic agent.
[3088] 309. A diagnostic kit for use, or test device for use, according to statement 308, wherein the agent capable of inhibiting or reversing EMT or chemotherapeutic agent is an Axl inhibitor, Akt3 inhibitor, Slfn11 inhibitor, or PHGDH inhibitor.
[3089] 310. A diagnostic kit for use, or test device for use, according to statement 308, wherein the agent capable of inhibiting or reversing EMT or chemotherapeutic agent is an Axl inhibitor.
[3090] 311. A diagnostic kit for use, or test device for use, according to statement 310, wherein the Axl inhibitor is BGB324/R428/bemcentinib, cabozantinib, TP-0903, foretinib, merestinib, bosutinib, gilteritinib, crizotinib, amuvatinib, sunitinib, sitravatinib, LDC1267, UNC2025, or an anti-Axl antibody described in WO2015/193428, WO2015/193430, WO2016/097370, or WO2016/166296.
[3091] 312. A diagnostic kit for use, or test device for use, according to statement 311, wherein the Axl inhibitor is BGB324/R428/bemcentinib.
[3092] 313. A diagnostic kit for use, or test device for use, according to statement 311, wherein the Axl inhibitor is an anti-Axl antibody described in WO2015/193428, WO2015/193430, WO2016/097370, or WO2016/166296.
[3093] 314. A diagnostic kit for use, or test device for use, according to statement 308, wherein the agent capable of inhibiting or reversing EMT or chemotherapeutic agent is an Akt3 inhibitor.
[3094] 315. A diagnostic kit for use, or test device for use, according to any one of statements 307-310, wherein the subject has, is suspected of having, or has been diagnosed with triple-negative breast cancer (TNBC).
[3095] 316. A diagnostic kit for use, or test device for use, according to any one of statements 307-315, wherein the method is a method according to any one of statements 101-180.
[3096] 317. Use of a reagent for detecting the activity, expression, or amount of a biomarker selected from the group consisting of: Axl, IL-6R beta, ICAM-1, MIP-1 beta, Periostin, IL-23, FOLR3, CLU, and/or FasL, in a method of predicting a cancer-related outcome in a subject.
[3097] 318. Use of 1, 2, 3, 4, 5, 6, 7, 8, 9, 10 or more reagents for detecting the activity, expression, or amount a biomarker, each of which is selective for a particular biomarker selected from the group consisting of: Axl, IL-6R beta, ICAM-1, MIP-1 beta, Periostin, IL-23, FOLR3, CLU, and/or FasL, in a method of manufacture of a diagnostic kit or test device for use in a method of predicting a cancer-related outcome in a subject.
[3098] 319. A use according to statement 317 or 318, wherein the reagent for detecting comprises a specific binding member selective for a particular biomarker.
[3099] 320. A use according to statement 317 or 318, wherein the method of predicting a cancer-related outcome in a subject is a method according to any one of statements 101-180.
[3100] 401. Use of one or more of: Axl, IL-6R beta, ICAM-1, MIP-1 beta, Periostin, IL-23, FOLR3, CLU, and/or FasL, as a biomarker for determining if a subject is susceptible to treatment with an agent capable of inhibiting or reversing EMT or a chemotherapeutic agent.
[3101] 402. A use according to statement 401, wherein:
   [3102] (i) a higher activity, expression, or amount of one or more of said biomarkers in the subject, or sample derived from the subject, compared with a control profile for the respective biomarker is indicative of susceptibility to treatment with an agent capable of inhibiting or reversing EMT or a chemotherapeutic agent; or
   [3103] (ii) a lower activity, expression, or amount of one or more of said biomarkers in the subject, or sample derived from the subject, compared with a control profile for the respective biomarker is indicative of susceptibility to treatment with an agent capable of inhibiting or reversing EMT or a chemotherapeutic agent.
[3104] 403. A use according to statement 401, wherein:
   [3105] (i) an increase in the activity, expression, or amount of one or more biomarker relative to a control profile for the respective biomarker after contacting the subject with a cancer therapeutic agent is indicative of increased susceptibility to treatment with an agent capable of inhibiting or reversing EMT or a chemotherapeutic agent; or
   [3106] (ii) a decrease in the activity, expression, or amount of one or more biomarker relative to a control profile for the respective biomarker after contacting the subject with a cancer therapeutic agent is indicative of increased susceptibility to treatment with an agent capable of inhibiting or reversing EMT or a chemotherapeutic agent.
[3107] 404. A use according to any one of statements 401-403, wherein the use is as a biomarker in a method according to any one of statements 101-180
   [3108] 501. A method of treating a subject having, suspected of having, or diagnosed with triple-negative breast cancer (TNBC), the method comprising:
   [3109] identifying a subject susceptible to treatment using a method according to any one of statements 101-180; and
   [3110] administering to the subject a therapeutically effective amount of an agent capable of inhibiting or reversing EMT or a chemotherapeutic agent.
[3111] 502. A method of treating a subject having, suspected of having, or diagnosed with triple-negative breast cancer (TNBC), the method comprising:
   [3112] (a) obtaining a sample from the subject;
   [3113] (b) determining if the subject is susceptible to treatment with an agent capable of inhibiting or reversing EMT or a chemotherapeutic agent using a method according to any one of statements 101-180;
   [3114] (c) administering to the subject a therapeutically effective amount of an agent capable of inhibiting or reversing EMT or a chemotherapeutic agent.
[3115] 503. A method of treating a subject having, suspected of having, or diagnosed with triple-negative breast cancer (TNBC), the method comprising administering a therapeutically effective amount of an agent capable of inhibiting or reversing EMT or chemotherapeutic agent to a subject identified as susceptible to said treatment using a method according to any one of statements 101-180.
[3116] 504. A method of treating a subject having, suspected of having, or diagnosed with triple-negative breast cancer (TNBC), the method comprising:
   [3117] administering to the subject a therapeutically effective amount of an agent capable of inhibiting or reversing EMT or a chemotherapeutic agent; and
   [3118] determining if the subject is susceptible to said treatment using a method according to any one of statements 148-180.
[3119] 505. A method according to statement 504, wherein the method comprises administering to the subject one or more further therapeutically effective amounts of an agent capable of inhibiting or reversing EMT or a chemotherapeutic agent provided that the subject is identified as susceptible to said treatment.
[3120] 506. An agent capable of inhibiting or reversing EMT or chemotherapeutic agent for use in a method of treating a subject having, suspected of having, or diagnosed with triple-negative breast cancer (TNBC), wherein the method is a method according to any one of statements 501-505.
[3121] 507. Use of an agent capable of inhibiting or reversing EMT or chemotherapeutic agent for use in a method of manufacture of a medicament for use in a method of treating a subject having, suspected of having, or diagnosed with triple-negative breast cancer (TNBC), wherein the method of treatment is a method according to any one of statements 501-505.
[3122] 508. A method, agent for use, or use according to any one of statements 501-507, wherein the agent capable of inhibiting or reversing EMT or chemotherapeutic agent comprises an Axl inhibitor, Akt3 inhibitor, Slfn11 inhibitor, or PHGDH inhibitor.
[3123] 509. A method, agent for use, or use according to statement 508, wherein the agent capable of inhibiting or reversing EMT or chemotherapeutic agent comprises an Axl inhibitor.
[3124] 510. A method, agent for use, or use according to statement 509, wherein the Axl inhibitor is BGB324/R428/bemcentinib, cabozantinib, TP-0903, foretinib, merestinib, bosutinib, gilteritinib, crizotinib, amuvatinib, sunitinib, sitravatinib, LDC1267, UNC2025, or an anti-Axl antibody described in WO2015/193428, WO2015/193430, WO2016/097370, or WO2016/166296.
[3125] 511. A method, agent for use, or use according to statement 510, wherein the Axl inhibitor is BGB324/R428/bemcentinib.
[3126] 512. A method, agent for use, or use according to statement 510, wherein the Axl inhibitor is an anti-Axl antibody described in WO2015/193428, WO2015/193430, WO2016/097370, or WO2016/166296.
[3127] 512. A method, agent for use, or use according to statement 508, wherein the agent capable of inhibiting or reversing EMT or chemotherapeutic agent comprises an Akt3 inhibitor.
[3128] 513. A method, agent for use, or use according to statement 512, wherein the Akt3 inhibitor is an Akt3 inhibitor disclosed in WO2016/102672.
[3129] 514. A method, agent for use, or use according to any one of statements 501-513, wherein the agent capable of inhibiting or reversing EMT or chemotherapeutic agent is administered as a single agent.
[3130] 515. A method, agent for use, or use according to any one of statements 501-513, wherein the agent capable of inhibiting or reversing EMT or chemotherapeutic agent is administered in combination with a further cancer treatment.
[3131] 516. A method, agent for use, or use according to statement 515, wherein the further cancer treatment is selected from the further cancer treatments listed in statement 130.
[3132] 517. A method, agent for use, or use according to statement 515, wherein the further cancer treatment is a PD-1 inhibitor or PD-L1 inhibitor.
[3133] 518. A method, agent for use, or use according to statement 515, wherein the further cancer treatment is a monoclonal antibody such as pembrolizumab, alemtuzumab, bevacizumab, cetuximab, ibritumomab, tiuxetan, or rituximab.
[3134] 519. A method, agent for use, or use according to statement 517 or 518, wherein the further cancer treatment is pembrolizumab.

[3135] Facet 6: Non-Small Cell Lung Cancer (NSCLC)

[3136] Non-small cell lung cancers (NSCLC) are any type of epithelial lung cancer other than small cell lung carcinoma (SCLC), and make up the majority of all lung cancers. Non-small cell lung carcinomas are grouped together because their prognosis and management are similar—the three main histologic classes are: squamous cell lung carcinoma, adenocarcinoma, and large cell lung carcinoma. Adenocarcinoma is the most common histologic type of lung carcinoma. Non-small cell lung cancers are often treated with cisplatin or carboplatin, in combination with gemcitabine, paclitaxel, docetaxel, etoposide or vinorelbine. There remains a need for targeted therapies for NSCLC (Herbst et al, 2018; Zappa et al, 2016).

[3137] Accordingly, robust biomarkers for predicting cancer-related outcomes in a subject having NSCLC, for example susceptibility to treatment with an agent capable of inhibiting or reversing EMT or a chemotherapeutic agent, would be useful in identifying subjects who are most likely to respond to or benefit from treatment with a particular agent/regimen.

[3138] A “responder” subject as described herein is a subject who is likely to, or who does, respond to treatment (or benefit from treatment) with an agent capable of inhibiting or reversing EMT or a chemotherapeutic agent, for example the small molecule Axl kinase inhibitor BGB324/R428/bemcentinib when administered either as a single agent or in combination with another cancer treatment.

[3139] Correspondingly, a “non-responder” subject as described herein is a subject who is not likely to, or who does not, respond to treatment (or benefit from treatment) with an agent capable of inhibiting or reversing EMT or a chemotherapeutic agent, for example the small molecule Axl kinase inhibitor BGB324/R428/bemcentinib when administered either as a single agent or in combination with another cancer treatment.

[3140] To “respond to treatment” or “benefit from treatment” as used herein means to experience an overall clinical benefit from the treatment. This overall clinical benefit can be any of: prolonged survival, partial or complete disease remission, slowing or absence of disease progression, tumour shrinkage (for example, a reduction in tumour volume of 5, 10, 20, 30, 40% or more), reduction in tumour burden (for example, a reduction in tumour burden of 5, 10, 20, 30, 40% or more), slowing or absence of tumour enlargement, slowing or absence of increase in tumour burden, improved quality of life, progression-free survival, overall survival, or any other positive patient outcome. Suitable methods for determining tumour volume are well known to the skilled person, for example, using: computed tomography (CT), or magnetic resonance imaging (MRI) imaging technologies; X-ray imaging, for example, mammography; ultrasound imaging; nuclear imaging, for example positron emission tomography (PET), PET/CT scans, bone scans, gallium scans, or metaiodobenzylguanidine (MIBG) scans; bioluminescence imaging (BLI); fluorescence imaging (FLI); BD ToF (infrared-based 3D Time-of-Flight camera) imaging.

[3141] Biomarkers

[3142] The term “marker” or “biomarker” is used herein to refer to a gene or protein whose expression in a subject or sample derived from a subject is altered or modulated, for example, up or down regulated, in cancer. Where the biomarker is a protein, modulation or alteration of expression encompasses modulation through different post-translational modifications.

[3143] In accordance with any aspect of this facet of the present disclosure the biomarkers described herein may be defined as follows, wherein:
[3144] an Axl biomarker comprises an amino acid sequence having at least 70%, 80%, 90%, 95%, 99% or 100% sequence identity with the full-length of the amino acid sequence disclosed at UniProt accession no: P30530-1 or P30530-2 (entry version 196) or a fragment thereof;
[3145] a Beta Amyloid 1-40 (AB-40) biomarker comprises an amino acid sequence having at least 70%, 80%, 90%, 95%, 99% or 100% sequence identity with the full-length of the amino acid sequence disclosed at UniProt accession no: P05067-1, P05067-2, P05067-3, P05067-4, P05067-5, P05067-6, P05067-7, P05067-8, P05067-9, P05067-10, or P05067-11 (entry version 271) or a fragment thereof;
[3146] an Aggrecan core protein (Aggrecan) biomarker comprises an amino acid sequence having at least 70%, 80%, 90%, 95%, 99% or 100% sequence identity with the full-length of the amino acid sequence disclosed at UniProt accession no: P16112-1, P16112-2, or P16112-3 (entry version 197) or a fragment thereof;
[3147] a Ferritin (FRTN) biomarker comprises an amino acid sequence having at least 70%, 80%, 90%, 95%, 99% or 100% sequence identity with the full-length of the amino acid sequence disclosed at UniProt accession no: P02794 (entry version 213) or a fragment thereof;
[3148] a Receptor for advanced glycosylation end products (RAGE) biomarker comprises an amino acid sequence having at least 70%, 80%, 90%, 95%, 99% or 100% sequence identity with the full-length of the amino acid sequence disclosed at UniProt accession no: Q15109-1, Q15109-2, Q15109-3, Q15109-4, Q15109-5, Q15109-6, Q15109-7, Q15109-8, Q15109-9, Q15109-10 (entry version 189) or a fragment thereof;
[3149] a Neuronal Cell Adhesion Molecule (Nr-CAM) biomarker comprises an amino acid sequence having at least 70%, 80%, 90%, 95%, 99% or 100% sequence identity with the full-length of the amino acid sequence disclosed at UniProt accession no: Q92823-1, Q92823-2, Q92823-3, Q92823-4, Q92823-5, or Q92823-6 (entry version 172) or a fragment thereof;
[3150] a Sclerostin biomarker comprises an amino acid sequence having at least 70%, 80%, 90%, 95%, 99% or 100% sequence identity with the full-length of the amino acid sequence disclosed at UniProt accession no: Q9BQB4-1 or Q9BQB4-2 (entry version 145) or a fragment thereof;
[3151] a Prostate-Specific Antigen, Free (PSA-f) biomarker comprises an amino acid sequence having at least 70%, 80%, 90%, 95%, 99% or 100% sequence identity with the full-length of the amino acid sequence disclosed at UniProt accession no: P07288-1, P07288-2, P07288-3, P07288-4, or P07288-5 (entry version 197) or a fragment thereof;
[3152] an Epidermal Growth Factor Receptor (EGFR) biomarker comprises an amino acid sequence having at least 70%, 80%, 90%, 95%, 99% or 100% sequence identity with the full-length of the amino acid sequence disclosed at UniProt accession no: Q504U8 (entry version 138) or a fragment thereof;
[3153] a Neurofilament heavy polypeptide (NF-H) biomarker comprises an amino acid sequence having at least 70%, 80%, 90%, 95%, 99% or 100% sequence identity with the full-length of the amino acid sequence disclosed at UniProt accession no: P12036-1 or P12036-2 (entry version 177) or a fragment thereof;
[3154] a Dopamine beta-hydroxylase (DBH) biomarker comprises an amino acid sequence having at least 70%, 80%, 90%, 95%, 99% or 100% sequence identity with the full-length of the amino acid sequence disclosed at UniProt accession no: P09172 (entry version 194) or a fragment thereof;
[3155] a Fibulin-1C (Fib-1C) biomarker comprises an amino acid sequence having at least 70%, 80%, 90%, 95%, 99% or 100% sequence identity with the full-length of the amino acid sequence disclosed at UniProt accession no: P23142-1, P23142-2, P23142-3, or P23142-4 (entry version 217) or a fragment thereof;
[3156] a Myoglobin biomarker comprises an amino acid sequence having at least 70%, 80%, 90%, 95%, 99% or 100% sequence identity with the full-length of the amino acid sequence disclosed at UniProt accession no: P02144 (entry version 178) or a fragment thereof;
[3157] a Urokinase-type Plasminogen Activator (uPA) biomarker comprises an amino acid sequence having at least 70%, 80%, 90%, 95%, 99% or 100% sequence identity with the full-length of the amino acid sequence disclosed at UniProt accession no: P00749-1 or P00749-2 (entry version 230) or a fragment thereof;
[3158] a Visceral adipose tissue-derived serpin A12 (Vaspin) biomarker comprises an amino acid sequence having at least 70%, 80%, 90%, 95%, 99% or 100% sequence identity with the full-length of the amino acid sequence disclosed at UniProt accession no: Q8IW75 (entry version 122) or a fragment thereof;
[3159] an Interleukin-23 (IL-23) biomarker comprises an amino acid sequence having at least 70%, 80%, 90%, 95%, 99% or 100% sequence identity with the full-length of the amino acid sequence disclosed at UniProt accession no: Q9NPF7 (entry version 133) or a fragment thereof;
[3160] an Alpha-2-Macroglobulin (A2Macro) biomarker comprises an amino acid sequence having at least 70%, 80%, 90%, 95%, 99% or 100% sequence identity with the full-length of the amino acid sequence disclosed at UniProt accession no: P01023 (entry version 206) or a fragment thereof;
[3161] a Tissue Inhibitor of Metalloproteinases 2 (TIMP-2) biomarker comprises an amino acid sequence having at least 70%, 80%, 90%, 95%, 99% or 100% sequence identity with the full-length of the amino acid sequence disclosed at UniProt accession no: P16035 (entry version 187) or a fragment thereof;
[3162] a Lactate Dehydrogenase (LDH) biomarker comprises an amino acid sequence having at least 70%, 80%, 90%, 95%, 99% or 100% sequence identity with the full-length of the amino acid sequence disclosed at UniProt accession no: P00338-1, P00338-2, P00338-3, P00338-4, or P00338-5 (entry version 224) or a fragment thereof; and/or
[3163] a Lactate Dehydrogenase (LDH) biomarker comprises an amino acid sequence having at least 70%, 80%, 90%, 95%, 99% or 100% sequence identity with the full-length of the amino acid sequence disclosed at UniProt accession no: P07195-1 (entry version 218) or a fragment thereof.

[3164] In accordance with any aspect of this facet of the present disclosure the biomarkers described herein may also be defined as follows, wherein:
[3165] an Axl biomarker comprises an amino acid sequence having at least 70%, 80%, 90%, 95%, 99% or 100% sequence identity with the full-length of the amino acid sequence disclosed at UniProt accession no: P30530-1 or P30530-2 (entry version 196) or a fragment thereof;
[3166] a Thyroid-Stimulating Hormone (TSH) biomarker comprises an amino acid sequence having at least 70%, 80%, 90%, 95%, 99% or 100% sequence identity with the full-length of the amino acid sequence disclosed at UniProt accession no: P01222-1 or P01222-2 (entry version 161) or a fragment thereof;
[3167] a Tetranectin biomarker comprises an amino acid sequence having at least 70%, 80%, 90%, 95%, 99% or 100% sequence identity with the full-length of the amino acid sequence disclosed at UniProt accession no: P05452 (entry version 177) or a fragment thereof;
[3168] a Myeloid Progenitor Inhibitory Factor 1 (MPIF-1) biomarker comprises an amino acid sequence having at least 70%, 80%, 90%, 95%, 99% or 100% sequence identity with the full-length of the amino acid sequence disclosed at UniProt accession no: P55773-1 or P55773-2 (entry version 162) or a fragment thereof;
[3169] a Pancreatic Polypeptide (PPP) biomarker comprises an amino acid sequence having at least 70%, 80%, 90%, 95%, 99% or 100% sequence identity with the full-length of the amino acid sequence disclosed at UniProt accession no: P01298-1 or P01298-2 (entry version 175) or a fragment thereof;
[3170] a Visceral adipose tissue-derived serpin A12 (Vaspin) biomarker comprises an amino acid sequence having at least 70%, 80%, 90%, 95%, 99% or 100% sequence identity with the full-length of the amino acid sequence disclosed at UniProt accession no: Q8IW75 (entry version 122) or a fragment thereof;
[3171] an Interleukin-7 (IL-7) biomarker comprises an amino acid sequence having at least 70%, 80%, 90%, 95%, 99% or 100% sequence identity with the full-length of the amino acid sequence disclosed at UniProt accession no: P13232-1, P13232-2, or P13232-3 (entry version 170) or a fragment thereof;
[3172] a Pulmonary and Activation-Regulated Chemokine (PARC) biomarker comprises an amino acid sequence having at least 70%, 80%, 90%, 95%, 99% or 100% sequence identity with the full-length of the amino acid sequence disclosed at UniProt accession no: P55774 (entry version 152) or a fragment thereof;
[3173] a Cancer Antigen 15-3 (CA-15-3) biomarker comprises an amino acid sequence having at least 70%, 80%, 90%, 95%, 99% or 100% sequence identity with the full-length of the amino acid sequence disclosed at UniProt accession no: P15941-1, P15941-2, P15941-3, P15941-4, P15941-5, P15941-6, P15941-7, P15941-8, P15941-9, P15941-10, P15941-11, P15941-12, P15941-13, P15941-14, P15941-15, P15941-16, or P15941-17 (entry version 204) or a fragment thereof;
[3174] a Lactate Dehydrogenase (LDH) biomarker comprises an amino acid sequence having at least 70%, 80%, 90%, 95%, 99% or 100% sequence identity with the full-length of the amino acid sequence disclosed at UniProt accession no: P00338-1, P00338-2, P00338-3, P00338-4, or P00338-5 (entry version 224) or a fragment thereof; and/or
[3175] a Lactate Dehydrogenase (LDH) biomarker comprises an amino acid sequence having at least 70%, 80%, 90%, 95%, 99% or 100% sequence identity with the full-length of the amino acid sequence disclosed at UniProt accession no: P07195-1 (entry version 218) or a fragment thereof.

[3176] In accordance with any aspect of this facet of the present disclosure the biomarkers described herein may also be defined as follows, wherein:
[3177] an Axl biomarker comprises an amino acid sequence having at least 70%, 80%, 90%, 95%, 99% or 100% sequence identity with the full-length of the amino acid sequence disclosed at UniProt accession no: P30530-1 or P30530-2 (entry version 196) or a fragment thereof;
[3178] a Pepsinogen I (PGI) biomarker comprises an amino acid sequence having at least 70%, 80%, 90%, 95%, 99% or 100% sequence identity with the full-length of the amino acid sequence disclosed at UniProt accession no: P0DJD8 (entry version 50) or a fragment thereof;
[3179] an Apolipoprotein E (Apo E) biomarker comprises an amino acid sequence having at least 70%, 80%, 90%, 95%, 99% or 100% sequence identity with the full-length of the amino acid sequence disclosed at UniProt accession no: P02649 (entry version 230) or a fragment thereof;
[3180] an Apolipoprotein C-I (Apo C-I) biomarker comprises an amino acid sequence having at least 70%, 80%, 90%, 95%, 99% or 100% sequence identity with the full-length of the amino acid sequence disclosed at UniProt accession no: P02654 (entry version 175) or a fragment thereof;
[3181] a Macrophage-Stimulating Protein (MSP) biomarker comprises an amino acid sequence having at least 70%, 80%, 90%, 95%, 99% or 100% sequence identity with the full-length of the amino acid sequence disclosed at UniProt accession no: P26927 (entry version 179) or a fragment thereof;
[3182] a C-C motif chemokine 15 (CCL15) biomarker comprises an amino acid sequence having at least 70%, 80%, 90%, 95%, 99% or 100% sequence identity with the full-length of the amino acid sequence disclosed at UniProt accession no: Q16663 (entry version 161) or a fragment thereof;
[3183] a Progranulin biomarker comprises an amino acid sequence having at least 70%, 80%, 90%, 95%, 99% or 100% sequence identity with the full-length of the amino acid sequence disclosed at UniProt accession no: P28799-1, P28799-2, or P28799-3 (entry version 197) or a fragment thereof;
[3184] a Carcinoembryonic antigen-related cell adhesion molecule 1 (CEACAM1) biomarker comprises an amino acid sequence having at least 70%, 80%, 90%, 95%, 99% or 100% sequence identity with the full-length of the amino acid sequence disclosed at UniProt accession no: P13688-1, P13688-2, P13688-3, P13688-4, P13688-5, P13688-6, P13688-7, P13688-8, P13688-9, P13688-10, or P13688-11 (entry version 197) or a fragment thereof;
[3185] a Vitamin D-Binding Protein (VDBP) biomarker comprises an amino acid sequence having at least 70%, 80%, 90%, 95%, 99% or 100% sequence identity with the full-length of the amino acid sequence disclosed at UniProt accession no: P02774-1, P02774-2, or P02774-3 (entry version 201) or a fragment thereof;
[3186] a Carbonic anhydrase 9 (CA-9) biomarker comprises an amino acid sequence having at least 70%, 80%, 90%, 95%, 99% or 100% sequence identity with the full-length of the amino acid sequence disclosed at UniProt accession no: Q16790 (entry version 171) or a fragment thereof;
[3187] a Lactate Dehydrogenase (LDH) biomarker comprises an amino acid sequence having at least 70%, 80%, 90%, 95%, 99% or 100% sequence identity with the full-length of the amino acid sequence disclosed at UniProt accession no: P00338-1, P00338-2, P00338-3, P00338-4, or P00338-5 (entry version 224) or a fragment thereof; and/or
[3188] a Lactate Dehydrogenase (LDH) biomarker comprises an amino acid sequence having at least 70%, 80%, 90%, 95%, 99% or 100% sequence identity with the full-length of the amino acid sequence disclosed at UniProt accession no: P07195-1 (entry version 218) or a fragment thereof.

[3189] The biomarkers described herein may also be defined as a nucleic acid (either DNA or RNA) having at least 70%, 80%, 90%, 95%, 99% or 100% sequence identity with the full-length nucleic acid sequence encoding any of the above amino acid sequences.

[3190] Identity may be as defined using sequence comparisons made using FASTA and FASTP (see Pearson & Lipman, 1988. Methods in Enzymology 183: 63-98). Parameters are preferably set, using the default matrix, as follows: Gapopen (penalty for the first residue in a gap): −12 for proteins/-16 for DNA; Gapext (penalty for additional residues in a gap): −2 for proteins/-4 for DNA; KTUP word length: 2 for proteins/6 for DNA.

[3191] Pre-Treatment Predictive Biomarkers and Methods

[3192] By analysing patient data obtained from clinical trial BGBC008 (NCT03184571), BGBIL005 (NCT02922777), and BGBC004 (NCT02424617), the authors have discovered that, prior to treatment of subjects having NSCLC, certain of the biomarkers described herein are present in the serum of “responder” subjects at higher levels than in the serum of “non-responder” subjects—see Examples 4, 5, 6, and 7. Similarly, prior to treatment of the subject certain of the biomarkers described herein are present in the serum of “responder” subjects at lower levels than in the serum of “non-responder” subjects. Thus, by assessing the activity, expression, or amount of one or more of the biomarkers described herein prior to treatment with an agent capable of inhibiting or reversing EMT or a chemotherapeutic agent it is possible to determine the likelihood of that subject being susceptible or responsive to treatment with said agent.

[3193] Accordingly, in a first aspect of this facet, the disclosure provides a method of predicting a cancer-related outcome in a subject having, suspected of having, or diagnosed with non-small cell lung cancer (NSCLC), the method comprising assessing the activity, expression, or amount of one or more of the biomarkers described herein in the subject, or in a sample derived from the subject.

[3194] In some embodiments the one or more biomarker is selected from the group consisting of: Axl, Beta Amyloid 1-40 (AB-40), Aggrecan core protein (Aggrecan), Ferritin (FRTN), Receptor for advanced glycosylation end products (RAGE), Neuronal Cell Adhesion Molecule (Nr-CAM), Sclerostin, Prostate-Specific Antigen, Free (PSA-f), Epidermal Growth Factor Receptor (EGFR), Neurofilament heavy polypeptide (NF-H), Dopamine beta-hydroxylase (DBH), Fibulin-1C (Fib-1C), Myoglobin, Urokinase-type Plasminogen Activator (uPA), Visceral adipose tissue-derived serpin A12 (Vaspin), Interleukin-23 (IL-23), Alpha-2-Macroglobulin (A2Macro), Tissue Inhibitor of Metalloproteinases 2 (TIMP-2), Thyroid-Stimulating Hormone (TSH), Tetranectin, Myeloid Progenitor Inhibitory Factor 1 (MPIF-1), Pancreatic Polypeptide (PPP), Interleukin-7 (IL-7), Pulmonary and Activation-Regulated Chemokine (PARC), Cancer Antigen 15-3 (CA-15-3), Pepsinogen I (PGI), Apolipoprotein E (Apo E), Apolipoprotein C-I (Apo C-I), Macrophage-Stimulating Protein (MSP), C-C motif chemokine 15 (CCL15), Progranulin, Carcinoembryonic antigen-related cell adhesion molecule 1 (CEACAM1), Vitamin D-Binding Protein (VDBP), Carbonic anhydrase 9 (CA-9), and/or Lactate Dehydrogenase (LDH).

[3195] In some embodiments the one or more biomarker is selected from the group consisting of: Axl, Beta Amyloid 1-40 (AB-40), Aggrecan core protein (Aggrecan), Ferritin (FRTN), Receptor for advanced glycosylation end products (RAGE), Neuronal Cell Adhesion Molecule (Nr-CAM), Sclerostin, Prostate-Specific Antigen, Free (PSA-f), Epidermal Growth Factor Receptor (EGFR), Neurofilament heavy polypeptide (NF-H), Dopamine beta-hydroxylase (DBH), Fibulin-1C (Fib-1C), Myoglobin, Urokinase-type Plasminogen Activator (uPA), Visceral adipose tissue-derived serpin A12 (Vaspin), Interleukin-23 (IL-23), Alpha-2-Macroglobulin (A2Macro), Tissue Inhibitor of Metalloproteinases 2 (TIMP-2), and/or Lactate Dehydrogenase (LDH).

[3196] In some embodiments the one or more biomarker is selected from the group consisting of: Axl, Beta Amyloid 1-40 (AB-40), Aggrecan core protein (Aggrecan), Ferritin (FRTN), Receptor for advanced glycosylation end products (RAGE), Neuronal Cell Adhesion Molecule (Nr-CAM), Sclerostin, Prostate-Specific Antigen, Free (PSA-f), Epidermal Growth Factor Receptor (EGFR), Neurofilament heavy polypeptide (NF-H), Dopamine beta-hydroxylase (DBH), Fibulin-1C (Fib-1C), Myoglobin, Urokinase-type Plasminogen Activator (uPA), Visceral adipose tissue-derived serpin A12 (Vaspin), Interleukin-23 (IL-23), Alpha-2-Macroglobulin (A2Macro), and/or Tissue Inhibitor of Metalloproteinases 2 (TIMP-2).

[3197] In some embodiments the one or more biomarker is selected from the group consisting of: Axl, Thyroid-Stimulating Hormone (TSH), Tetranectin, Myeloid Progenitor Inhibitory Factor 1 (MPIF-1), Pancreatic Polypeptide (PPP), Visceral adipose tissue-derived serpin A12 (Vaspin), Interleukin-7 (IL-7), Pulmonary and Activation-Regulated Chemokine (PARC), Cancer Antigen 15-3 (CA-15-3), and/or Lactate Dehydrogenase (LDH).

[3198] In some embodiments the one or more biomarker is selected from the group consisting of: Axl, Thyroid-Stimulating Hormone (TSH), Tetranectin, Myeloid Progenitor Inhibitory Factor 1 (MPIF-1), Pancreatic Polypeptide (PPP), Visceral adipose tissue-derived serpin A12 (Vaspin), Interleukin-7 (IL-7), Pulmonary and Activation-Regulated Chemokine (PARC), and/or Cancer Antigen 15-3 (CA-15-3).

[3199] In some embodiments the one or more biomarker is selected from the group consisting of: Axl, Pepsinogen I (PGI), Apolipoprotein E (Apo E), Apolipoprotein C-I (Apo C-I), Macrophage-Stimulating Protein (MSP), C-C motif chemokine 15 (CCL15), Progranulin, Carcinoembryonic antigen-related cell adhesion molecule 1 (CEACAM1), Vitamin D-Binding Protein (VDBP), Carbonic anhydrase 9 (CA-9), and/or Lactate Dehydrogenase (LDH).

[3200] In some embodiments the one or more biomarker is selected from the group consisting of: Axl, Pepsinogen I (PGI), Apolipoprotein E (Apo E), Apolipoprotein C-I (Apo C-I), Macrophage-Stimulating Protein (MSP), C-C motif chemokine 15 (CCL15), Progranulin, Carcinoembryonic antigen-related cell adhesion molecule 1 (CEACAM1), Vitamin D-Binding Protein (VDBP), and/or Carbonic anhydrase 9 (CA-9).

[3201] A “cancer-related outcome” as described herein is a clinical prediction or prognosis associated with cancer. In some embodiments the cancer-related outcome is susceptibility to treatment with an agent capable of inhibiting or reversing EMT or a chemotherapeutic agent.

[3202] In some embodiments the method comprises assessing the activity, expression, or amount of one or more of the biomarkers described herein in the subject, or in a sample derived from the subject, to obtain a sample profile of the one or more biomarker; and, making a prediction based on the sample profile of the one or more biomarker.

[3203] A “sample profile” as used herein is a profile of numerical values or numerical ranges corresponding to the activity, expression, or amount of respective biomarkers determined in the subject or sample derived from the subject.

[3204] In some embodiments of the method the prediction is made by comparing the sample profile to a control profile. A “control profile” as used herein is a profile of numerical values or numerical ranges corresponding to the activity, expression, or amount of the same biomarkers as for the sample profile, determined in a control subject or population of control subjects. Suitable control profiles are described in more detail below.

[3205] Prior to treatment of a subject, certain of the biomarkers described herein have been found to exhibit up-regulated expression in “responder” subjects—that is, certain of the biomarkers described herein have been found to be present in the serum of “responder” subjects at higher levels than in the serum of “non-responder” subjects. Similarly, prior to treatment of a subject, certain of the biomarkers described herein have been found to exhibit down-regulated expression in “responder” subjects—that is, certain of the biomarkers described herein have been found to be present in the serum of “responder” subjects at lower levels than in the serum of “non-responder” subjects.

[3206] This difference in expression level between “responder” and “non-responder” subjects can also be expressed in the opposite way. That is to say, prior to treatment of a subject, certain of the biomarkers described herein have been found to exhibit down-regulated expression in “non-responder” subjects—that is, certain of the biomarkers described herein have been found to be present in the serum of “non-responder” subjects at lower levels than in the serum of “responder” subjects. Similarly, prior to treatment of a subject, certain of the biomarkers described herein have been found to exhibit up-regulated expression in “non-responder” subjects—that is, certain of the biomarkers described herein have been found to be present in the serum of “non-responder” subjects at higher levels than in the serum of “responder” subjects.

[3207] The discovery of these differential patterns of expression mean that, by assessing the activity, expression, or amount of one or more of the biomarkers described herein prior to treatment of a subject with an agent, it is possible to determine the likelihood of that subject being susceptible or responsive to treatment with said agent. Accordingly, in particularly preferred embodiments the sample profile is obtained before the subject is contacted with or administered the agent capable of inhibiting or reversing EMT or a chemotherapeutic agent.

[3208] A subject who is “susceptible to treatment” with an agent capable of inhibiting or reversing EMT or a chemotherapeutic agent is one who is likely to, or who does, respond to treatment (or benefit from treatment) with an agent capable of inhibiting or reversing EMT or a chemotherapeutic agent. That is, a subject who is “susceptible to treatment” with an agent is a “responder” subject for that agent, as defined above. A prediction that is “indicative of susceptibility” is one which suggests or points towards the likelihood that a subject will respond to or benefit from treatment.

[3209] In some embodiments the predictive methods of the disclosure comprise assessing the activity, expression, or amount of one or more of the biomarkers described herein in the subject, or in a sample derived from the subject, to obtain a sample profile of the one or more biomarker; and, making a prediction based on the sample profile of the one or more biomarker. In some embodiments of the method the prediction is made by comparing the sample profile to a control profile, wherein the control profile is a profile of numerical values or numerical ranges corresponding to the activity, expression, or amount of the same biomarkers as for the sample profile, determined in a control subject or population of control subjects.

[3210] In some embodiments the control profile may be obtained from a population of control subjects having NSCLC. In some embodiments the control profile may be obtained from a population of control subjects not having NSCLC. In other embodiments the control profile may be obtained from a control subject or population of control subjects having NSCLC and previously found to lack susceptibility to treatment with an agent capable of inhibiting or reversing EMT or a chemotherapeutic agent (that is, non-responder subjects).

[3211] In some embodiments the control profile may a predetermined profile of biomarker expression, activity, or amount values, for example a profile of “mean” values, “threshold” values, or “standard ranges” of values. This predetermined profile of biomarker expression, activity, or amount values can be obtained, for example, from a control subject or population of control subjects having NSCLC, a control subject or population of control subjects not having NSCLC, or a control subject or population of control subjects having NSCLC and previously found to lack susceptibility to treatment with an agent capable of inhibiting or reversing EMT or a chemotherapeutic agent (that is, non-responder subjects).

[3212] In some other embodiments the control profile may be obtained from a control subject or population of control subjects having NSCLC and previously found to be susceptible to treatment with an agent capable of inhibiting or reversing EMT or a chemotherapeutic agent (that is, responder subjects). In some embodiments the control profile may a predetermined profile of biomarker expression, activity, or amount values, for example a profile of “threshold”, values or “standard ranges” of values. This predetermined profile of biomarker expression, activity, or amount values can be obtained, for example, from a control subject or population of control subjects having NSCLC and previously found to be susceptible to treatment with an agent capable of inhibiting or reversing EMT or a chemotherapeutic agent (that is, responder subjects).

[3213] In some other embodiments the control profile may be obtained from a control sample having a known amount (for example a “threshold” amount) of the same biomarkers as will be determined in the sample profile. This threshold amount can be obtained, for example, from non-responder or responder subjects as outlined above.

[3214] The skilled person is readily able to determine suitable “mean”, “threshold”, or “standard range” values for a particular biomarker.

[3215] For example, a “mean” value may be determined by: assessing the activity, expression, or amount of a particular biomarker in a population of subjects having (or not having) NSCLC; and, averaging the biomarker activity, expression, or amount determined to determine a “mean” value.

[3216] For example, a “mean” value may be determined by: assessing the activity, expression, or amount of a particular biomarker in a population of subjects; determining which subjects in the population are susceptible to treatment with an agent capable of inhibiting or reversing EMT or a chemotherapeutic agent; and, averaging the biomarker activity, expression, or amount determined in subjects found to be susceptible to treatment with an agent capable of inhibiting or reversing EMT or a chemotherapeutic agent (that is, responder subjects) to determine a “mean” value.

[3217] For example, a “threshold” value may be determined by: assessing the activity, expression, or amount of a particular biomarker in a population of subjects; determining which subjects in the population are susceptible to treatment with an agent capable of inhibiting or reversing EMT or a chemotherapeutic agent; and, selecting as appropriate the highest or lowest biomarker activity, expression, or amount determined in a subject found to be susceptible to treatment with an agent capable of inhibiting or reversing EMT or a chemotherapeutic agent (that is, a responder subject) as the “threshold value”.

[3218] For example, a “standard range” of values may be determined by: assessing the activity, expression, or amount of a particular biomarker in a population of subjects having (or not having) NSCLC; and, determining a “standard range” of values based on this assessment.

[3219] For example, a “standard range” of values may be determined by: assessing the activity, expression, or amount of a particular biomarker in a population of subjects; determining which subjects in the population are susceptible to treatment with an agent capable of inhibiting or reversing EMT or a chemotherapeutic agent; and, determining a “standard range” of values for subjects found to be susceptible to treatment with an agent capable of inhibiting or reversing EMT or a chemotherapeutic agent (that is, a responder subject) based on this assessment.

[3220] Where the control profile is a predetermined profile of biomarker expression, activity, or amount values, this may be provided as a “look-up table” or data record. Predetermined control profiles of this type may be a profile of numerical values or numerical ranges corresponding to a measure of central tendency (such as an average, median or mean) amount of the respective biomarkers determined in a plurality of control subjects (for example non-responder or responder subjects as outlined above). The skilled person is readily able to determine both a measure of central tendency and a measure of variability within a population using standard protein quantification techniques and suitable statistical tools.

[3221] Accordingly, in embodiments in which the control profile is: obtained from a population of control subjects having NSCLC; obtained from a population of control subjects not having NSCLC; obtained from a control subject or population of control subjects having NSCLC and previously found to lack susceptibility to treatment with an agent capable of inhibiting or reversing EMT or a chemotherapeutic agent (that is non-responder subjects); a predetermined profile of biomarker expression, activity, or amount values (for example a profile of “average, median, or mean” values or “standard ranges” of values) obtained from non-responder subjects; obtained from a control sample having a known “average, median, or mean” value of biomarkers indicative of non-responder subjects; a predetermined profile of biomarker expression, activity, or amount “threshold” values obtained from responder subjects; or, obtained from a control sample having a known “threshold” value of biomarkers indicative of responder subjects; then, a higher activity, expression, or amount of one or more of the biomarkers described herein in a sample profile as compared with the control profile may be indicative of susceptibility to treatment with an agent capable of inhibiting or reversing EMT or a chemotherapeutic agent. Similarly, a lower activity, expression, or amount of one or more of the biomarkers described herein in the sample profile as compared with a control profile may be indicative of susceptibility to treatment with an agent capable of inhibiting or reversing EMT or a chemotherapeutic agent.

[3222] In some such embodiments, the method may comprise assessing the activity, expression, or amount of one or more of biomarker selected from: Nr-CAM, Sclerostin, PSA-f, EGFR, NF-H, DBH, Fib-1C, Myoglobin, uPA, Vaspin, IL-23, A2Macro, TIMP-2, and/or LDH; wherein a higher activity, expression, or amount of one or more of said biomarkers in the sample profile as compared with the control profile is indicative of susceptibility to treatment with an agent capable of inhibiting or reversing EMT or a chemotherapeutic agent.

[3223] In some such embodiments, the method may comprise assessing the activity, expression, or amount of one or more of biomarker selected from: Axl, AB-40, Aggrecan, FRTN, and/or RAGE; wherein a lower activity, expression, or amount of one or more of said biomarkers in the sample profile as compared with the control profile is indicative of susceptibility to treatment with an agent capable of inhibiting or reversing EMT or a chemotherapeutic agent.

[3224] In some such embodiments: a lower activity, expression, or amount of Axl; and/or a lower activity, expression, or amount of AB-40; and/or a lower activity, expression, or amount of Aggrecan; and/or a lower activity, expression, or amount of FRTN; and/or a lower activity, expression, or amount of RAGE; and/or a higher activity, expression, or amount of Nr-CAM; and/or a higher activity, expression, or amount of Sclerostin; and/or a higher activity, expression, or amount of PSA-f; and/or a higher activity, expression, or amount of EGFR; and/or a higher activity, expression, or amount of NF-H; and/or a higher activity, expression, or amount of DBH; and/or a higher activity, expression, or amount of Fib-1C; and/or a higher activity, expression, or amount of Myoglobin; and/or a higher activity, expression, or amount of uPA; and/or a higher activity, expression, or amount of Vaspin; and/or a higher activity, expression, or amount of IL-23; and/or a higher activity, expression, or amount of A2Macro; and/or a higher activity, expression, or amount of TIMP-2; and/or a higher activity, expression, or amount of LDH; in the sample profile as compared with the control profile is indicative of susceptibility to treatment with an agent capable of inhibiting or reversing EMT or a chemotherapeutic agent.

[3225] In other such embodiments, the method may comprise assessing the activity, expression, or amount of one or more of biomarker selected from: MPIF-1, PPP, Vaspin, IL-7, PARC, CA-15-3, and/or LDH; wherein a higher activity, expression, or amount of one or more of said biomarkers in the sample profile as compared with the control profile is indicative of susceptibility to treatment with an agent capable of inhibiting or reversing EMT or a chemotherapeutic agent.

[3226] In other such embodiments, the method may comprise assessing the activity, expression, or amount of one or more of biomarker selected from: Axl, TSH, and/or Tetranectin; wherein a lower activity, expression, or amount of one or more of said biomarkers in the sample profile as compared with the control profile is indicative of susceptibility to treatment with an agent capable of inhibiting or reversing EMT or a chemotherapeutic agent.

[3227] In other such embodiments: a lower activity, expression, or amount of Axl; and/or a lower activity, expression, or amount of TSH; and/or a lower activity, expression, or amount of Tetranectin; and/or a higher activity, expression, or amount of MPIF-1; and/or a higher activity, expression, or amount of PPP; and/or a higher activity, expression, or amount of Vaspin; and/or a higher activity, expression, or amount of IL-7; and/or a higher activity, expression, or amount of PARC; and/or a higher activity, expression, or amount of CA-15-3; and/or a higher activity, expression, or amount of LDH; in the sample profile as compared with the control profile is indicative of susceptibility to treatment with an agent capable of inhibiting or reversing EMT or a chemotherapeutic agent.

[3228] In other such embodiments, the method may comprise assessing the activity, expression, or amount of one or more of biomarker selected from: VDBP, CA-9, and/or LDH; wherein a higher activity, expression, or amount of one or more of said biomarkers in the sample profile as compared with the control profile is indicative of susceptibility to treatment with an agent capable of inhibiting or reversing EMT or a chemotherapeutic agent.

[3229] In other such embodiments, the method may comprise assessing the activity, expression, or amount of one or more of biomarker selected from: Axl, PGI, Apo E, Apo C-I, MSP, CCL15, Progranulin, and/or CEACAM1; wherein a lower activity, expression, or amount of one or more of said biomarkers in the sample profile as compared with the control profile is indicative of susceptibility to treatment with an agent capable of inhibiting or reversing EMT or a chemotherapeutic agent.

[3230] In other such embodiments: a lower activity, expression, or amount of Axl; and/or a lower activity, expression, or amount of PGI; and/or a lower activity, expression, or amount of Apo E; and/or a lower activity, expression, or amount of Apo C-I; and/or a lower activity, expression, or amount of MSP; and/or a lower activity, expression, or amount of CCL15; and/or a lower activity, expression, or amount of Progranulin; and/or a lower activity, expression, or amount of CEACAM1; and/or a higher activity, expression, or amount of VDBP; and/or a higher activity, expression, or amount of CA-9; and/or a higher activity, expression, or amount of LDH; in the sample profile as compared with the control profile is indicative of susceptibility to treatment with an agent capable of inhibiting or reversing EMT or a chemotherapeutic agent.

[3231] In embodiments in which the control profile is: obtained from a control subject or population of control subjects having NSCLC and previously found to be susceptible to treatment with an agent capable of inhibiting or reversing EMT or a chemotherapeutic agent (that is, responder subjects); then, if the expression, activity, or amount values in the sample profile are above a “threshold” value typical of a responder subject (that is, a subject having NSCLC and previously found to be susceptible to treatment with an agent capable of inhibiting or reversing EMT or a chemotherapeutic agent) this is indicative of susceptibility to treatment with an agent capable of inhibiting or reversing EMT or a chemotherapeutic agent. Similarly, if the expression, activity, or amount values in the sample profile are below the “threshold” value typical of a responder subject (that is, a subject having NSCLC and previously found to be susceptible to treatment with an agent capable of inhibiting or reversing EMT or a chemotherapeutic agent) this is indicative of a lack of susceptibility to treatment with an agent capable of inhibiting or reversing EMT or a chemotherapeutic agent.

[3232] In embodiments in which the control profile is: a predetermined profile of “standard ranges” of biomarker expression, activity, or amount values obtained from responder subjects; then, if the expression, activity, or amount values in the sample profile are within the “standard range” of values typical of a responder subject (that is, a subject having NSCLC and previously found to be susceptible to treatment with an agent capable of inhibiting or reversing EMT or a chemotherapeutic agent) this is indicative of susceptibility to treatment with an agent capable of inhibiting or reversing EMT or a chemotherapeutic agent. Similarly, if the expression, activity, or amount values in the sample profile are outside the “standard range” of values typical of a responder subject (that is, a subject having NSCLC and previously found to be susceptible to treatment with an agent capable of inhibiting or reversing EMT or a chemotherapeutic agent) this is indicative of a lack of susceptibility to treatment with an agent capable of inhibiting or reversing EMT or a chemotherapeutic agent.

[3233] In embodiments in which the control profile is: a predetermined profile of “standard ranges” of biomarker expression, activity, or amount values obtained from non-responder subjects; then, if the expression, activity, or amount values in the sample profile are within the “standard range” of values typical of a non-responder subject (that is, a subject having NSCLC and previously found to lack susceptibility to treatment with an agent capable of inhibiting or reversing EMT or a chemotherapeutic agent) this is indicative of a lack of susceptibility to treatment with an agent capable of inhibiting or reversing EMT or a chemotherapeutic agent. Similarly, if the expression, activity, or amount values in the sample profile are outside the “standard range” of values typical of a non-responder subject (that is, a subject having NSCLC and previously found to lack susceptibility to treatment with an agent capable of inhibiting or reversing EMT or a chemotherapeutic agent) this may be indicative of susceptibility to treatment with an agent capable of inhibiting or reversing EMT or a chemotherapeutic agent.

[3234] In embodiments in which the control profile is: obtained from a population of control subjects not having NSCLC; then, if the expression, activity, or amount values in the sample profile are outside a “standard range” of values typical of subjects not having NSCLC, this is indicative of susceptibility to treatment with an agent capable of inhibiting or reversing EMT or a chemotherapeutic agent. Similarly, if the expression, activity, or amount values in the sample profile are within a “standard range” of values typical of subjects not having NSCLC, this is indicative of a lack of susceptibility to treatment with an agent capable of inhibiting or reversing EMT or a chemotherapeutic agent. In such cases, an expression, activity or amount value may be outside the “standard range” of values when it is either above the upper limit of normal or below the lower limit of normal for a given biomarker. The upper limit of normal and lower limit of normal are the limits of the normal distribution of a given biomarker in a population of control subjects not having NSCLC.

[3235] In embodiments in which the one or more biomarker comprises LDH, an expression or amount of LDH higher than 287 units per litre (U/L) may be indicative of susceptibility to treatment with an agent capable of inhibiting or reversing EMT or a chemotherapeutic agent.

[3236] The skilled person is readily able to determine whether the sample profile is indicative of susceptibility or lack of susceptibility to treatment with an agent capable of inhibiting or reversing EMT or a chemotherapeutic agent using suitable statistical tools and comparison with the appropriate control.

[3237] In some embodiments the sample profile may be compared with two or more control profiles as described above.

[3238] As used herein, the term “one or more” means 1, 2, 3, 4, 5, 6, 7, 8, 9, 10, 11, 12, 13, 14, 15, 16, 17, 18, 19, or 20 of the biomarkers described herein. In some embodiments the one or more biomarker is Axl. In some embodiments the one or more biomarker is AB-40. In some embodiments the one or more biomarker is Aggrecan. In some embodiments the one or more biomarker is FRTN. In some embodiments the one or more biomarker is RAGE. In some embodiments the one or more biomarker is Nr-CAM. In some embodiments the one or more biomarker is Sclerostin. In some embodiments the one or more biomarker is PSA-f. In some embodiments the one or more biomarker is EGFR. In some embodiments the one or more biomarker is NF-H. In some embodiments the one or more biomarker is DBH. In some embodiments the one or more biomarker is Fib-1C. In some embodiments the one or more biomarker is Myoglobin. In some embodiments the one or more biomarker is uPA. In some embodiments the one or more biomarker is Vaspin. In some embodiments the one or more biomarker is IL-23. In some embodiments the one or more biomarker is A2Macro. In some embodiments the one or more biomarker is TIMP-2. In some embodiments the one or more biomarker is LDH. In some preferred embodiments the one or more biomarker is Axl. In some preferred embodiments the one or more biomarker is LDH. In other preferred embodiments the one or more biomarker is Axl and LDH.

[3239] In some embodiments the one or more biomarker is Axl. In some embodiments the one or more biomarker is TSH. In some embodiments the one or more biomarker is Tetranectin. In some embodiments the one or more biomarker is MPIF-1. In some embodiments the one or more biomarker is PPP. In some embodiments the one or more biomarker is Vaspin. In some embodiments the one or more biomarker is IL-7. In some embodiments the one or more biomarker is PARC. In some embodiments the one or more biomarker is CA-15-3. In some embodiments the one or more biomarker is LDH. In some preferred embodiments the one or more biomarker is Axl. In some preferred embodiments the one or more biomarker is LDH. In other preferred embodiments the one or more biomarker is Axl and LDH.

[3240] In some embodiments the one or more biomarker is Axl. In some embodiments the one or more biomarker is PGI. In some embodiments the one or more biomarker is Apo E. In some embodiments the one or more biomarker is Apo C-I. In some embodiments the one or more biomarker is MSP. In some embodiments the one or more biomarker is CCL15. In some embodiments the one or more biomarker is Progranulin. In some embodiments the one or more biomarker is CEACAM1. In some embodiments the one or more biomarker is VDBP. In some embodiments the one or more biomarker is CA-9. In some embodiments the one or more biomarker is LDH. In some preferred embodiments the one or more biomarker is Axl. In some preferred embodiments the one or more biomarker is CA-9. In some preferred embodiments the one or more biomarker is LDH. In other preferred embodiments the one or more biomarker is Axl and CA-9. In other preferred embodiments the one or more biomarker is Axl and LDH. In other preferred embodiments the one or more biomarker is CA-9 and LDH. In other preferred embodiments the one or more biomarker is Axl, CA-9, and LDH.

[3241] In some embodiments the method may comprise assessing the activity, expression, or amount of at least 2, 3, 4, 5, 6, 7, 8, 9, 10, 11, 12, 13, 14, 15, 20 of said biomarkers in the subject, or in a sample derived from the subject. In some preferred embodiments the method may comprise assessing the activity, expression, or amount of Axl and at least 1, 2, 3, 4, 5, 6, 7, 8, 9, 10, 11, 12, 13, 14, 15, 20 further biomarkers described herein in the subject, or in a sample derived from the subject. In some preferred embodiments the method may comprise assessing the activity, expression, or amount of LDH and at least 1, 2, 3, 4, 5, 6, 7, 8, 9, 10, 11, 12, 13, 14, 15, 20 further biomarkers described herein in the subject, or in a sample derived from the subject. In some preferred embodiments the method may comprise assessing the activity, expression, or amount of CA-9, and at least 1, 2, 3, 4, 5, 6, 7, 8, 9, 10, 11, 12, 13, 14, 15, 20 further biomarkers described herein in the subject, or in a sample derived from the subject. In some preferred embodiments the method may comprise assessing the activity, expression, or amount of Axl, LDH, and at least 1, 2, 3, 4, 5, 6, 7, 8, 9, 10, 11, 12, 13, 14, 15, 20 further biomarkers described herein in the subject, or in a sample derived from the subject. In other preferred embodiments the method may comprise assessing the activity, expression, or amount of Axl, CA-9, and at least 1, 2, 3, 4, 5, 6, 7, 8, 9, 10, 11, 12, 13, 14, 15, 20 further biomarkers described herein in the subject, or in a sample derived from the subject. In some preferred embodiments the method may comprise assessing the activity, expression, or amount of CA-9, LDH, and at least 1, 2, 3, 4, 5, 6, 7, 8, 9, 10, 11, 12, 13, 14, 15, 20 further biomarkers described herein in the subject, or in a sample derived from the subject. In some preferred embodiments the method may comprise assessing the activity, expression, or amount of Axl, CA-9, LDH, and at least 1, 2, 3, 4, 5, 6, 7, 8, 9, 10, 11, 12, 13, 14, 15, 20 further biomarkers described herein in the subject, or in a sample derived from the subject.

[3242] Subject

[3243] A “subject” as referred to herein is any species of animal classified as a mammal, and includes but is not restricted to, domestic and farm animals, primates and humans. In some preferred embodiments the subject is a human of any sex or race. In some embodiments, the human is an adult human.

[3244] In some embodiments the predictive methods described herein are performed before the subject receives a treatment or course of treatment for NSCLC. In other embodiments the predictive method is performed during or after a treatment or course of treatment for NSCLC. In some embodiments the treatment or course of treatment for NSCLC is an agent capable of inhibiting or reversing EMT. In other embodiments the treatment or course of treatment for NSCLC is a chemotherapeutic treatment that is not an agent capable of inhibiting or reversing EMT.

[3245] In some embodiments of the predictive methods described herein the subject has previously been treated with an agent capable of inhibiting or reversing EMT or a chemotherapeutic agent. In some embodiments the subject has previously been treated with an agent selected from: a PHGDH inhibitor, a Slfn11 inhibitor, an Axl inhibitor, or an Akt3 inhibitor.

[3246] In some embodiments of the predictive methods described herein the subject has previously been treated with an agent that is different to the agent capable of inhibiting or reversing EMT or chemotherapeutic agent for which the subject's response is being predicted. That is, the subject has previously been treated with an agent that is not the agent which the predictive method is determining the subject's susceptibility to. Accordingly, in some embodiments, the subject has not previously been treated with an agent capable of inhibiting or reversing EMT or a chemotherapeutic agent. In some preferred embodiments, the subject has not previously been treated with an Axl inhibitor. In other preferred embodiments, the subject has not previously been treated with an Akt3 inhibitor.

[3247] Post-Treatment Changes in Biomarkers

[3248] In some embodiments of this aspect of the disclosure, the predictive method further comprises a subsequent step of assessing the activity, expression, or amount of one or more biomarker in the subject, or in a sample derived from the subject, to obtain a second sample profile of one or more of the biomarkers described herein after the subject has received a treatment or course of treatment an agent capable of inhibiting or reversing EMT or a chemotherapeutic agent.

[3249] That is, in some embodiments, the predictive method comprises:
[3250] (a) determining if a subject is susceptible to treatment with an agent capable of inhibiting or reversing EMT or a chemotherapeutic agent by assessing the activity, expression, or amount of one or more biomarker in the subject, as outlined above;
[3251] (b) administering to the subject a therapeutically effective amount of an agent capable of inhibiting or reversing EMT or a chemotherapeutic agent; and
[3252] (c) subsequently assessing the activity, expression, or amount of one or more biomarker in the subject, or in a sample derived from the subject.

[3253] In some embodiments, the predictive method comprises:
[3254] (a) determining if a subject is susceptible to treatment with an agent capable of inhibiting or reversing EMT or a chemotherapeutic agent by assessing the activity, expression, or amount of one or more biomarker in the subject, or in a sample derived from the subject, wherein the one or more biomarker is selected from the group consisting of:
[3255] (i) Axl, AB-40, Aggrecan, FRTN, RAGE, Nr-CAM, Sclerostin, PSA-f, EGFR, NF-H, DBH, Fib-1C, Myoglobin, uPA, Vaspin, IL-23, A2Macro, TIMP-2, and/or LDH;
[3256] (ii) Axl, AB-40, Aggrecan, FRTN, RAGE, Nr-CAM, Sclerostin, PSA-f, EGFR, NF-H, DBH, Fib-1C, Myoglobin, uPA, Vaspin, IL-23, A2Macro, and/or TIMP-2;
[3257] (iii) Axl, TSH, MPIF-1, PPP, Vaspin, IL-7, PARC, CA-15-3, and/or LDH;
[3258] (iv) Axl, TSH, MPIF-1, PPP, Vaspin, IL-7, PARC, and/or CA-15-3;
[3259] (v) Axl, PGI, Apo E, Apo C-I, MSP, CCL15, Progranulin, CEACAM1, VDBP, CA-9, and/or LDH; or
[3260] (vi) Axl, PGI, Apo E, Apo C-I, MSP, CCL15, Progranulin, CEACAM1, VDBP, and/or CA-9;
[3261] (b) administering to the subject a therapeutically effective amount of an agent capable of inhibiting or reversing EMT or a chemotherapeutic agent; and
[3262] (c) subsequently assessing the activity, expression, or amount of one or more biomarker in the subject, or in a sample derived from the subject.

[3263] In some preferred embodiments the methods comprise subsequently assessing the activity, expression, or amount of Axl in the subject, or in a sample derived from the subject. In some embodiments an increase in the activity, expression, or amount of Axl in the second sample profile as compared with a control profile after contacting the subject with a cancer therapeutic agent is indicative of higher susceptibility to treatment with an agent capable of inhibiting or reversing EMT or a chemotherapeutic agent. In some preferred embodiments the control profile is obtained from the same subject prior to treatment with an agent capable of inhibiting or reversing EMT or a chemotherapeutic agent.

[3264] Post-Treatment Predictive Biomarkers and Methods

[3265] By analysing patient data obtained from clinical trial BGBC008 (NCT03184571), BGBIL005 (NCT02922777), and BGBC004 (NCT02424617), the authors have discovered that, following treatment of subjects having NSCLC with an agent capable of inhibiting or reversing EMT or a chemotherapeutic agent, the levels of certain of the biomarkers described herein increases in the serum of “responder” subjects but not in the serum of “non-responder” subjects. Similarly, following treatment with an agent capable of inhibiting or reversing EMT or a chemotherapeutic agent, the levels of certain of the biomarkers described herein decreases in the serum of “responder” subjects but not in the serum of “non-responder” subjects. Thus, by assessing the activity, expression, or amount of one or more of the biomarkers described herein prior to and following treatment with an agent capable of inhibiting or reversing EMT or a chemotherapeutic agent it is possible to determine or confirm that the subject is susceptible or responsive to treatment with said agent.

[3266] Accordingly, in a second aspect of this facet the disclosure provides a method of predicting a cancer-related outcome in a subject having, suspected of having, or diagnosed with non-small cell lung cancer (NSCLC), the method comprising assessing the activity, expression, or amount of one or more of the biomarkers described herein in a subject, or in a sample derived from the subject after the subject has been contacted with an agent capable of inhibiting or reversing EMT or a chemotherapeutic agent. In some embodiments the cancer-related outcome is susceptibility to treatment with an agent capable of inhibiting or reversing EMT or a chemotherapeutic agent.

[3267] In some embodiments the method comprises assessing the activity, expression, or amount of one or more of the biomarkers described herein in the subject, or in a sample derived from the subject, to obtain a sample profile of the one or more biomarker; and, making a prediction based on the sample profile of the one or more biomarker. In some embodiments of the method the prediction is made by comparing the sample profile to a control profile. In preferred embodiments the sample profile is obtained after contacting the subject with an agent capable of inhibiting or reversing EMT or a chemotherapeutic agent.

[3268] A “control profile” as used herein is a profile of numerical values or numerical ranges corresponding to the activity, expression, or amount of the same biomarkers as for the sample profile, determined in a control subject or population of control subjects.

[3269] In preferred embodiments of this aspect of the disclosure the control profile is obtained from the same subject prior to treatment with an agent capable of inhibiting or reversing EMT or a chemotherapeutic agent. In some embodiments the control profile is obtained from a population of control subjects having NSCLC. In other embodiments, the control profile is a predetermined profile of biomarker expression, activity, or amount values, for example a profile of “threshold” values or “standard ranges” of values.

[3270] Accordingly, in embodiments in which the control profile is obtained from the same subject prior to treatment with an agent capable of inhibiting or reversing EMT or a chemotherapeutic agent, an increase in the activity, expression, or amount of one or more biomarker in the sample profile as compared with a control profile after contacting the subject with an agent capable of inhibiting or reversing EMT or a cancer therapeutic agent may be indicative of susceptibility to treatment with an agent capable of inhibiting or reversing EMT or a chemotherapeutic agent. In such embodiments, a decrease in the activity, expression, or amount of one or more biomarker in the sample profile as compared with a control profile after contacting the subject with a cancer therapeutic agent may be indicative of higher susceptibility to treatment with an agent capable of inhibiting or reversing EMT or a chemotherapeutic agent.

[3271] In some such embodiments, an increase in the activity, expression, or amount of one or more biomarker in the sample profile as compared with a control profile after contacting the subject with a cancer therapeutic agent may be indicative of lower susceptibility to treatment with an agent capable of inhibiting or reversing EMT or a chemotherapeutic agent. In some such embodiments, a decrease in the activity, expression, or amount of one or more biomarker in the sample profile as compared with a control profile after contacting the subject with a cancer therapeutic agent may be indicative of lower susceptibility to treatment with an agent capable of inhibiting or reversing EMT or a chemotherapeutic agent.

[3272] In some preferred embodiments the one or more biomarker includes at least Axl. In some embodiments the one or more biomarker is Axl. In some embodiments an increase in the activity, expression, or amount of Axl in the sample profile as compared with a control profile after contacting the subject with a cancer therapeutic agent is indicative of higher susceptibility to treatment with an agent capable of inhibiting or reversing EMT or a chemotherapeutic agent.

[3273] Subject

[3274] A “subject” as referred to herein is any species of animal classified as a mammal, and includes but is not restricted to, domestic and farm animals, primates and humans. In some preferred embodiments the subject is a human of any sex or race. In some embodiments, the human is an adult human.

[3275] In some embodiments of this aspect of the disclosure, the subject was selected for treatment with the agent capable of inhibiting or reversing EMT or a chemotherapeutic agent, using a predictive method according to the first aspect of this facet of the disclosure outlined above.

[3276] Agents Capable of Inhibiting or Reversing EMT

[3277] The present disclosure provides methods for predicting a cancer-related outcome in a subject having, suspected of having, or diagnosed with non-small cell lung cancer (NSCLC). A “cancer-related outcome” is a clinical prediction or prognosis associated with cancer.

[3278] The agents capable of inhibiting or reversing EMT for use in this NSCLC facet of the disclosure are defined as described above in the AML facet (see identically titled section above on page 14, line 19 to page 17, line 2).

[3279] In some preferred embodiments the further cancer treatment is a PD-1 inhibitor or PD-L1 inhibitor. In some embodiments the further cancer treatment is a monoclonal antibody such as pembrolizumab, alemtuzumab, bevacizumab, cetuximab, ibritumomab, tiuxetan, or rituximab. In some preferred embodiments the further cancer treatment is a microtubule polymer stabilizer such as the taxanes paclitaxel and docetaxel. In some preferred embodiments the further cancer treatment is a tyrosine kinase inhibitors such as erlotinib hydrochloride, gefitinib, imatinib mesylate, and semaxanib. In some particularly preferred embodiments the further cancer treatment is pembrolizumab. In other particularly preferred embodiments the further cancer treatment is docetaxel. In yet other particularly preferred embodiments the further cancer treatment is erlotinib.

[3280] Assessing Biomarker Activity, Expression, Amount

[3281] In some embodiments of the predictive methods described herein, assessing the activity, expression, or amount of one or more biomarker in a subject, or in a sample derived from a subject, comprises: contacting a sample, or an extract from a sample, with at least 1, 2, 3, 4, 5, 6, 7, 8, 9, 10 or more reagents for detecting the activity, expression, or amount of one or more biomarkers, each of which is selective for a particular biomarker; and, detecting and/or quantifying said reagents for detecting.

[3282] In some embodiments comprising assessing the activity of LDH, assessing the activity of LDH comprises determining the enzymatic activity of LDH in the subject or sample derived from the subject. Preferably the enzymatic activity is assessed by determining the level or amount of a substrate or product of the enzymatic reaction catalysed by LDH in the subject or sample derived from the subject. In particularly preferred embodiments the enzymatic activity is assessed by determining the level or amount of reduced nicotinamide adenine dinucleotide (NADH) in the subject or sample derived from the subject. In some embodiments this may be determined using a colorimetric assay, for example, the colorimetric assay available from Sigma-Aldrich with catalogue number MAK066. Other suitable assays for assessing activity of LDH are well known to the skilled person. In particularly preferred embodiments the activity of LDH is assessed by determining the enzymatic activity of LDH in blood or serum.

[3283] In some preferred embodiments, assessing the expression or amount of the one or more biomarker comprises determining the level of the one or more biomarker protein or mRNA in the subject or sample derived from the subject. Preferably the expression or amount of the one or more biomarker is assessed by determining the level of protein expression. In particularly preferred embodiments the expression or amount of the one or more biomarker is assessed by determining the level of protein expression in serum.

[3284] The term “expression” refers to the transcription of a gene's DNA template to produce the corresponding mRNA and translation of this mRNA to produce the corresponding gene product (i.e., a peptide, polypeptide, or protein) as well as the “expression” of a protein in one or more forms that may have been modified post translation.

[3285] In some embodiments determining the level of the one or more biomarker protein or mRNA comprises: contacting a sample, or an extract from a sample, with at least 1, 2, 3, 4, 5, 6, 7, 8, 9, 10 or more specific binding members, each of which selectively binds to a respective biomarker protein or mRNA; and, detecting and/or quantifying formation of complex formed by said specific binding member and said biomarker protein or mRNA. In some embodiments the specific binding member may comprise an antibody molecule or a binding fragment thereof.

[3286] A range of suitable techniques for determining protein and mRNA expression levels are well known in the art, for example microarray analysis, Western blotting, and PCR techniques such as QPCR. In some embodiments, determining the expression or amount of the one or more biomarker protein or mRNA may comprise use of a technique selected from: Western blot; enzyme-linked immunosorbent assay (ELISA); radioimmunoassay (RIA); competitive enzyme immunoassay; double antibody sandwich ELISA (DAS-ELISA); liquid immunoarray technology; immunocytochemistry; immunohistochemistry; antibody microarray detection; precipitation of colloidal gold; affinity chromatography; ligand binding assay; and lectin binding assay.

[3287] In some embodiments, the expression or amount of the one or more biomarker is determined as an absolute amount of the respective biomarker protein or mRNA in the sample. In such cases, the respective biomarker protein or mRNA may be quantified in the sample and the amount expressed as a measure of the sample, for example the volume, mass, or total protein content of the sample.

[3288] In some embodiments, the expression or amount of the one or more biomarker is determined as a relative amount of the respective biomarker protein or mRNA in the sample, wherein the relative amount is determined relative to a reference protein or mRNA in the sample. Determining the relative amount of biomarker protein or mRNA in this way allows for normalisation to, e.g., account for differences in total protein concentration and to remove bias from sample to sample.

[3289] Preferably the reference protein or mRNA is one whose expression or amount does not vary significantly between subjects having cancer and subjects not having cancer, in particular NSCLC. That is, the reference protein or mRNA is preferably one whose expression or amount is not altered by NSCLC. Accordingly, the reference protein or mRNA may comprise one or more protein or mRNA which is not one of the biomarkers described herein. When expressing the expression or amount of the one or more biomarker as a relative amount, the absolute amount of the respective biomarker protein or mRNA in the sample may be divided by the absolute amount of the reference protein or mRNA in the sample.

[3290] Assessing Biomarker Expression at the RNA Level

[3291] Gene expression can be detected at the RNA level. RNA may be extracted from cells using RNA extraction techniques including, for example, using acid phenol/guanidine isothiocyanate extraction (RNAzol B; Biogenesis), RNeasy RNA preparation kits (Qiagen) or PAXgene (PreAnalytix, Switzerland). Typical assay formats utilising ribonucleic acid hybridisation include nuclear run-on assays, RT-PCR, RNase protection assays (Melton et al., Nuc. Acids Res. 12:7035), Northern blotting and In Situ hybridization. Gene expression can also be detected by microarray analysis as described below.

[3292] Assessing Biomarker Expression at the Protein Level

[3293] Preferably biomarker level is assessed by measuring protein expression. Altered gene or protein expression may also be detected by measuring the polypeptides encoded by the gene. This may be achieved by using molecules which bind to the polypeptides encoded by the biomarker gene. Suitable molecules/agents which bind either directly or indirectly to the polypeptides in order to detect the presence of the protein include naturally occurring molecules such as peptides and proteins, for example antibodies, or they may be synthetic molecules.

[3294] Antibodies may be derived from commercial sources or through techniques which are familiar to those skilled in the art. In one embodiment, and where altered expression manifests itself through the expression of alteration of post translationally-modified forms of a protein biomarker, antibodies specific for those different forms may be used. For the purposes of this disclosure, the term “antibody”, unless specified to the contrary, includes whole antibodies, or fragments of whole antibodies which retain their binding activity for a target antigen. Such fragments include Fv, F(ab′) and F(ab′)2 fragments, as well as single chain antibodies (scFv). Furthermore, the antibodies and fragments thereof may be humanised antibodies, for example as described in EP239400A. For example: monoclonal and polyclonal antibodies, recombinant antibodies, proteolytic and recombinant fragments of antibodies (Fab, Fv, scFv, diabodies), single-domain antibodies (VHH, sdAb, nanobodies, IgNAR, VNAR), and proteins unrelated to antibodies, which have been engineered to have antibody-like specific binding. Antibodies may be bound to a solid support and/or packaged into kits in a suitable container along with suitable reagents, controls, instructions and the like.

[3295] Arrays

[3296] Array technology and the various techniques and applications associated with it are well known in the art. Array technology overcomes the disadvantages with traditional methods in molecular biology, which generally work on a “one gene in one experiment” basis, resulting in low throughput and the inability to appreciate the “whole picture” of gene function. In the context of the products and methods of the present disclosure, array technology can be used, for example, in the analysis of the expression of biomarker proteins or mRNA.

[3297] In general, any library or group of samples may be arranged in an orderly manner into an array, by spatially separating the members of the library or group. Examples of suitable libraries for arraying include nucleic acid libraries (including DNA, cDNA, oligonucleotide, etc. libraries), peptide, polypeptide and protein libraries, as well as libraries comprising any molecules, such as ligand libraries, among others. Accordingly, where reference is made to a “library” in this document, unless the context dictates otherwise, such reference should be taken to include reference to a library in the form of an array.

[3298] Proteins, polypeptides, etc., may also be immobilised in arrays. For example, antibodies have been used in microarray analysis of the proteome using protein chips (Borrebaeck C A, 2000, Immunol Today 21(8):379-82). Polypeptide arrays are reviewed in, for example, MacBeath and Schreiber, 2000, Science, 289(5485):1760-1763.

[3299] Sample

[3300] Suitable samples include, but are not limited to, tissue samples such as tissue biopsy, blood, urine, buccal scrapes etc., as well as serum, plasma, or tissue culture supernatant samples. In preferred embodiments the expression or amount of the one or more biomarker is assessed by determining the level of protein expression in the sample. In some preferred embodiments the sample is a blood, serum, or plasma sample. In some particularly preferred embodiments the sample is a serum sample.

[3301] When assessing the expression or amount of the one or more biomarker proteins or mRNA in serum or plasma samples derived from a subject, samples are removed and subjected to analytical techniques such as flow cytometry, mass cytometry (CyTOF), ELISA, PET, and SELDI-TOF MS. In some embodiments, the method may comprise extracting RNA from said sample and detecting gene expression by QPCR. In some other embodiments, gene expression may be detected by detecting protein products by, for example, Western Blot.

[3302] In some embodiments, the level of expression of the one or more biomarker is assessed by determining the copy number of the gene encoding the one or more biomarker. Copy number (i.e. gene duplication events) may be determined using standard techniques known in the art, e.g. using a DNA chip as described in Jiang et al. (Jiang Q, Ho Y Y, Hao L, Nichols Berrios C, Chakravarti A. Copy number variants in candidate genes are genetic modifiers of Hirschsprung disease. PLoS One. 2011; 6(6)).

[3303] Is some preferred embodiments of the predictive methods described herein, the method is performed in vitro or ex vivo.

[3304] Methods of Selecting a Subject for Treatment

[3305] A third aspect of this facet of the present disclosure relates to methods of selecting subjects having, suspected of having, or diagnosed with non-small cell lung cancer (NSCLC) for treatment with an agent capable of inhibiting or reversing EMT or a chemotherapeutic agent. In some embodiments the method comprises: identifying subjects susceptible to treatment with an agent capable of inhibiting or reversing EMT or a chemotherapeutic agent using a predictive method defined in accordance with the above described first and second aspects of this facet of the disclosure; and, selecting thus identified subjects for treatment.

[3306] In some embodiments this aspect relates to methods of selecting subjects having, suspected of having, or diagnosed with non-small cell lung cancer (NSCLC) for continued treatment with an agent capable of inhibiting or reversing EMT or a chemotherapeutic agent. In some embodiments the method comprises: identifying subjects susceptible to treatment with an agent capable of inhibiting or reversing EMT or a chemotherapeutic agent using a predictive method defined in accordance with the above described second aspect of this facet of the disclosure; and, selecting thus identified subjects for treatment.

[3307] In some embodiments of this aspect of the disclosure, the treatment comprises administering to the subject a therapeutically effective amount of an agent capable of inhibiting or reversing EMT or a chemotherapeutic agent as described herein. Accordingly, in some embodiments the treatment comprises an Axl inhibitor, Akt3 inhibitor, Slfn11 inhibitor, or PHGDH inhibitor. In some preferred embodiments the treatment comprises an Axl inhibitor, for example, BGB324/R428/bemcentinib, cabozantinib, TP-0903, foretinib, merestinib, bosutinib, gilteritinib, crizotinib, amuvatinib, sunitinib, sitravatinib, LDC1267, or UNC2025. Other Axl inhibitors include the anti-Axl antibodies described in WO2015/193428, WO2015/193430, WO2016/097370, and WO2016/166296. In some preferred embodiments the Axl inhibitor is an anti-Axl antibody described in WO2015/193428, WO2015/193430, WO2016/097370, or WO2016/166296. In some particularly preferred embodiments the Axl inhibitor is BGB324/R428/bemcentinib.

[3308] In some other preferred embodiments, the treatment comprises an Akt3 inhibitor. In some embodiments the Akt3 inhibitor is an Akt3 inhibitor disclosed in WO2016/102672.

[3309] In some embodiments of this aspect of the disclosure, the treatment is administered as a single agent. In other embodiments, the treatment is administered in combination with a further cancer treatment. Suitable further cancer treatments are outlined in detail above.

[3310] In some preferred embodiments the further cancer treatment is a PD-1 inhibitor or PD-L1 inhibitor. In some embodiments the further cancer treatment is a monoclonal antibody such as pembrolizumab, alemtuzumab, bevacizumab, cetuximab, ibritumomab, tiuxetan, or rituximab. In some preferred embodiments the further cancer treatment is a microtubule polymer stabilizer such as the taxanes paclitaxel and docetaxel. In some preferred embodiments the further cancer treatment is a tyrosine kinase inhibitor such as erlotinib hydrochloride, gefitinib, imatinib mesylate, and semaxanib. In some particularly preferred embodiments the further cancer treatment is pembrolizumab. In other particularly preferred embodiments the further cancer treatment is docetaxel. In yet other particularly preferred embodiments the further cancer treatment is erlotinib.

[3311] Kits

[3312] A fourth aspect of this facet of the present disclosure relates to diagnostic kits and test devices. In some embodiments the disclosure provides a diagnostic kit comprising 1, 2, 3, 4, 5, 6, 7, 8, 9, 10 or more reagents for detecting the activity, expression, or amount of one or more of the biomarkers described herein, each of which is selective for a particular biomarker. In some embodiments each of the reagents for detecting is selective for a biomarker selected from the group consisting of: Axl, AB-40, Aggrecan, FRTN, RAGE, Nr-CAM, Sclerostin, PSA-f, EGFR, NF-H, DBH, Fib-1C, Myoglobin, uPA, Vaspin, IL-23, A2Macro, TIMP-2, TSH, MPIF-1, PPP, IL-7, PARC, CA-15-3, PGI, Apo E, Apo C-I, MSP, CCL15, Progranulin, CEACAM1, VDBP, CA-9, and/or LDH. In some embodiments each of the reagents for detecting is selective for a biomarker selected from the group consisting of: Axl, AB-40, Aggrecan, FRTN, RAGE, Nr-CAM, Sclerostin, PSA-f, EGFR, NF-H, DBH, Fib-1C, Myoglobin, uPA, Vaspin, IL-23, A2Macro, TIMP-2, TSH, MPIF-1, PPP, IL-7, PARC, CA-15-3, PGI, Apo E, Apo C-I, MSP, CCL15, Progranulin, CEACAM1, VDBP, and/or CA-9.

[3313] In other embodiments the disclosure provides a test device comprising 1, 2, 3, 4, 5, 6, 7, 8, 9, 10 or more reagents for detecting the activity, expression, or amount of one or more of the biomarkers described herein, each of which is selective for a particular biomarker. In some embodiments each of the reagents for detecting is selective for a biomarker selected from the group consisting of: Axl, AB-40, Aggrecan, FRTN, RAGE, Nr-CAM, Sclerostin, PSA-f, EGFR, NF-H, DBH, Fib-1C, Myoglobin, uPA, Vaspin, IL-23, A2Macro, TIMP-2, TSH, MPIF-1, PPP, IL-7, PARC, CA-15-3, PGI, Apo E, Apo C-I, MSP, CCL15, Progranulin, CEACAM1, VDBP, CA-9, and/or LDH. In some embodiments each of the reagents for detecting is selective for a biomarker selected from the group consisting of: Axl, AB-40, Aggrecan, FRTN, RAGE, Nr-CAM, Sclerostin, PSA-f, EGFR, NF-H, DBH, Fib-1C, Myoglobin, uPA, Vaspin, IL-23, A2Macro, TIMP-2, TSH, MPIF-1, PPP, IL-7, PARC, CA-15-3, PGI, Apo E, Apo C-I, MSP, CCL15, Progranulin, CEACAM1, VDBP, and/or CA-9.

[3314] In some embodiments the diagnostic kit or test device comprises 1, 2, 3, 4, 5, 6, 7, 8, 9, 10 or more specific binding members, each of which selectively binds to one of the biomarkers described herein; and, one or more reagents for detecting said one or more specific binding members, or one or more reagents for detecting and/or quantifying formation of a complex formed by said specific binding member and said biomarker. In some embodiments each specific binding member selectively binds to a biomarker selected from the group consisting of: Axl, AB-40, Aggrecan, FRTN, RAGE, Nr-CAM, Sclerostin, PSA-f, EGFR, NF-H, DBH, Fib-1C, Myoglobin, uPA, Vaspin, IL-23, A2Macro, TIMP-2, TSH, MPIF-1, PPP, IL-7, PARC, CA-15-3, PGI, Apo E, Apo C-I, MSP, CCL15, Progranulin, CEACAM1, VDBP, CA-9, and/or LDH. In some embodiments each specific binding member selectively binds to a biomarker selected from the group consisting of: Axl, AB-40, Aggrecan, FRTN, RAGE, Nr-CAM, Sclerostin, PSA-f, EGFR, NF-H, DBH, Fib-1C, Myoglobin, uPA, Vaspin, IL-23, A2Macro, TIMP-2, TSH, MPIF-1, PPP, IL-7, PARC, CA-15-3, PGI, Apo E, Apo C-I, MSP, CCL15, Progranulin, CEACAM1, VDBP, and/or CA-9.

[3315] In some embodiments each reagent for detecting or specific binding member is selective for a biomarker selected from the group:
[3316] (i) Axl, AB-40, Aggrecan, FRTN, RAGE, Nr-CAM, Sclerostin, PSA-f, EGFR, NF-H, DBH, Fib-1C, Myoglobin, uPA, Vaspin, IL-23, A2Macro, TIMP-2, and/or LDH;
[3317] (ii) Axl, AB-40, Aggrecan, FRTN, RAGE, Nr-CAM, Sclerostin, PSA-f, EGFR, NF-H, DBH, Fib-1C, Myoglobin, uPA, Vaspin, IL-23, A2Macro, and/or TIMP-2;
[3318] (iii) Axl, TSH, MPIF-1, PPP, Vaspin, IL-7, PARC, CA-15-3, and/or LDH;
[3319] (iv) Axl, TSH, MPIF-1, PPP, Vaspin, IL-7, PARC, and/or CA-15-3;
[3320] (v) Axl, PGI, Apo E, Apo C-I, MSP, CCL15, Progranulin, CEACAM1, VDBP, CA-9, and/or LDH; or
[3321] (vi) Axl, PGI, Apo E, Apo C-I, MSP, CCL15, Progranulin, CEACAM1, VDBP, and/or CA-9.

[3322] In some embodiments the diagnostic kit or test device comprises a specific binding member which selectively binds to Axl, and at least 1, 2, 3, 4, 5, 6, 7, 8, 9, 10, or more specific binding members, each of which selectively binds to a biomarker selected from the group consisting of:
[3323] (i) Axl, AB-40, Aggrecan, FRTN, RAGE, Nr-CAM, Sclerostin, PSA-f, EGFR, NF-H, DBH, Fib-1C, Myoglobin, uPA, Vaspin, IL-23, A2Macro, TIMP-2, and/or LDH;
[3324] (ii) Axl, AB-40, Aggrecan, FRTN, RAGE, Nr-CAM, Sclerostin, PSA-f, EGFR, NF-H, DBH, Fib-1C, Myoglobin, uPA, Vaspin, IL-23, A2Macro, and/or TIMP-2;
[3325] (iii) Axl, TSH, MPIF-1, PPP, Vaspin, IL-7, PARC, CA-15-3, and/or LDH;
[3326] (iv) Axl, TSH, MPIF-1, PPP, Vaspin, IL-7, PARC, and/or CA-15-3;
[3327] (v) Axl, PGI, Apo E, Apo C-I, MSP, CCL15, Progranulin, CEACAM1, VDBP, CA-9, and/or LDH; or
[3328] (vi) Axl, PGI, Apo E, Apo C-I, MSP, CCL15, Progranulin, CEACAM1, VDBP, and/or CA-9.

[3329] In some embodiments the diagnostic kit or test device comprises a specific binding member which selectively binds to LDH, and at least 1, 2, 3, 4, 5, 6, 7, 8, 9, 10, or more specific binding members, each of which selectively binds to a biomarker selected from the group consisting of:
[3330] (i) Axl, AB-40, Aggrecan, FRTN, RAGE, Nr-CAM, Sclerostin, PSA-f, EGFR, NF-H, DBH, Fib-1C, Myoglobin, uPA, Vaspin, IL-23, A2Macro, and/or TIMP-2;
[3331] (ii) Axl, TSH, MPIF-1, PPP, Vaspin, IL-7, PARC, and/or CA-15-3; or
[3332] (iii) Axl, PGI, Apo E, Apo C-I, MSP, CCL15, Progranulin, CEACAM1, VDBP, and/or CA-9.

[3333] In some embodiments the diagnostic kit or test device comprises a specific binding member which selectively binds to Axl, a specific binding member which selectively binds to LDH, and at least 1, 2, 3, 4, 5, 6, 7, 8, 9, 10, or more specific binding members, each of which selectively binds to a biomarker selected from the group consisting of:
[3334] (i) AB-40, Aggrecan, FRTN, RAGE, Nr-CAM, Sclerostin, PSA-f, EGFR, NF-H, DBH, Fib-1C, Myoglobin, uPA, Vaspin, IL-23, A2Macro, and/or TIMP-2;
[3335] (ii) TSH, MPIF-1, PPP, Vaspin, IL-7, PARC, and/or CA-15-3; or
[3336] (iii) PGI, Apo E, Apo C-I, MSP, CCL15, Progranulin, CEACAM1, VDBP, and/or CA-9.

[3337] In some embodiments the diagnostic kit or test device comprises a specific binding member which selectively binds to CA-9, and at least 1, 2, 3, 4, 5, 6, 7, 8, 9, 10, or more specific binding members, each of which selectively binds to a biomarker selected from the group consisting of: Axl, PGI, Apo E, Apo C-I, MSP, CCL15, Progranulin, CEACAM1, VDBP, and/or LDH. In some embodiments the diagnostic kit or test device comprises a specific binding member which selectively binds to CA-9, and at least 1, 2, 3, 4, 5, 6, 7, 8, 9, 10, or more specific binding members, each of which selectively binds to a biomarker selected from the group consisting of: Axl, PGI, Apo E, Apo C-I, MSP, CCL15, Progranulin, CEACAM1, and/or VDBP.

[3338] In some embodiments the diagnostic kit or test device comprises a specific binding member which selectively binds to Axl, a specific binding member which selectively binds to CA-9, and at least 1, 2, 3, 4, 5, 6, 7, 8, 9, 10, or more specific binding members, each of which selectively binds to a biomarker selected from the group consisting of: PGI, Apo E, Apo C-I, MSP, CCL15, Progranulin, CEACAM1, VDBP, and/or LDH. In some embodiments the diagnostic kit or test device comprises a specific binding member which selectively binds to Axl, a specific binding member which selectively binds to CA-9, and at least 1, 2, 3, 4, 5, 6, 7, 8, 9, 10, or more specific binding members, each of which selectively binds to a biomarker selected from the group consisting of: PGI, Apo E, Apo C-I, MSP, CCL15, Progranulin, CEACAM1, and/or VDBP.

[3339] In some embodiments the diagnostic kit or test device comprises a specific binding member which selectively binds to CA-9, a specific binding member which selectively binds to LDH, and at least 1, 2, 3, 4, 5, 6, 7, 8, 9, 10, or more specific binding members, each of which selectively binds to a biomarker selected from the group consisting of: Axl, PGI, Apo E, Apo C-I, MSP, CCL15, Progranulin, CEACAM1, and/or VDBP.

[3340] In some embodiments the diagnostic kit or test device comprises a specific binding member which selectively binds to Axl, a specific binding member which selectively binds to CA-9, a specific binding member which selectively binds to LDH, and at least 1, 2, 3, 4, 5, 6, 7, 8, 9, 10, or more specific binding members, each of which selectively binds to a biomarker selected from the group consisting of: PGI, Apo E, Apo C-I, MSP, CCL15, Progranulin, CEACAM1, and/or VDBP.

[3341] In some embodiments of this aspect of the disclosure the diagnostic kit or test device comprises a plurality of said specific binding members provided in the form of an array on a substrate or conjugated to a plurality of particles, such as beads or microspheres. The particles may be encoded with a detectable label. In some embodiments the specific binding member comprises an antibody molecule or a binding fragment thereof.

[3342] In some embodiments of the diagnostic kit or test device detecting formation of a complex formed by a specific binding member and a biomarker is carried out by use of a technique selected from: Western blot; enzyme-linked immunosorbent assay (ELISA); radioimmunoassay (RIA); competitive enzyme immunoassay; double antibody sandwich ELISA (DAS-ELISA); liquid immunoarray technology; immunocytochemistry; immunohistochemistry; antibody microarray detection; precipitation of colloidal gold; affinity chromatography; ligand binding assay; and lectin binding assay.

[3343] In some embodiments of the diagnostic kit or test device, the kit or test device comprises no more than 15, 20, 25, 30, 40, or 50 reagents for detecting. In some embodiments of the diagnostic kit or test device, the kit or test device comprises no more than 15, 20, 25, 30, 40, or 50 specific binding members.

[3344] The present disclosure also provides use of such diagnostic kits and test devices in methods of predicting a cancer-related outcome in a subject. In preferred embodiments the cancer-related outcome is susceptibility to treatment with an agent capable of inhibiting or reversing EMT or a chemotherapeutic agent as described herein.

[3345] In some embodiments the agent capable of inhibiting or reversing EMT or chemotherapeutic agent is an Axl inhibitor, Akt3 inhibitor, Slfn11 inhibitor, or PHGDH inhibitor. In some preferred embodiments the agent capable of inhibiting or reversing EMT or chemotherapeutic agent is an Axl inhibitor, for example BGB324/R428/bemcentinib, cabozantinib, TP-0903, foretinib, merestinib, bosutinib, gilteritinib, crizotinib, amuvatinib, sunitinib, sitravatinib, LDC1267, or UNC2025. Other Axl inhibitors include the anti-Axl antibodies described in WO2015/193428, WO2015/193430, WO2016/097370, and WO2016/166296. In some preferred embodiments the Axl inhibitor is an anti-Axl antibody described in WO2015/193428, WO2015/193430, WO2016/097370, or WO2016/166296. In some particularly preferred embodiments the Axl inhibitor is BGB324/R428/bemcentinib.

[3346] In some embodiments of the diagnostic kit or test device for use in a predictive method, the subject has, is suspected of having, or has been diagnosed with NSCLC.

[3347] In some embodiments the method may be as defined in accordance with the above described first and second aspects of this facet of the disclosure.

[3348] A fifth aspect of this facet of the present disclosure relates to the use of a reagent for detecting the activity, expression, or amount of a biomarker selected from the group consisting of: Axl, AB-40, Aggrecan, FRTN, RAGE, Nr-CAM, Sclerostin, PSA-f, EGFR, NF-H, DBH, Fib-1C, Myoglobin, uPA, Vaspin, IL-23, A2Macro, TIMP-2, TSH, MPIF-1, PPP, IL-7, PARC, CA-15-3, PGI, Apo E, Apo C-I, MSP, CCL15, Progranulin, CEACAM1, VDBP, CA-9, and/or LDH, in a method of predicting a cancer-related outcome in a subject.

[3349] A sixth aspect of this facet of the disclosure relates to the use of 1, 2, 3, 4, 5, 6, 7, 8, 9, 10 or more reagents for detecting the activity, expression, or amount a biomarker, each of which is selective for a particular biomarker selected from the group consisting of: Axl, AB-40, Aggrecan, FRTN, RAGE, Nr-CAM, Sclerostin, PSA-f, EGFR, NF-H, DBH, Fib-1C, Myoglobin, uPA, Vaspin, IL-23, A2Macro, TIMP-2, TSH, MPIF-1, PPP, IL-7, PARC, CA-15-3, PGI, Apo E, Apo C-I, MSP, CCL15, Progranulin, CEACAM1, VDBP, CA-9, and/or LDH, in a method of manufacture of a diagnostic kit or test device for use in a method of predicting a cancer-related outcome in a subject. In some embodiments of these uses the reagent for detecting comprises a specific binding member selective for a particular biomarker. The specific binding member may comprise an antibody molecule or a binding fragment thereof.

[3350] In some embodiments the reagents for detecting or specific binding members may be selected from the group consisting of:
[3351] (i) Axl, AB-40, Aggrecan, FRTN, RAGE, Nr-CAM, Sclerostin, PSA-f, EGFR, NF-H, DBH, Fib-1C, Myoglobin, uPA, Vaspin, IL-23, A2Macro, TIMP-2, and/or LDH;
[3352] (ii) Axl, AB-40, Aggrecan, FRTN, RAGE, Nr-CAM, Sclerostin, PSA-f, EGFR, NF-H, DBH, Fib-1C, Myoglobin, uPA, Vaspin, IL-23, A2Macro, and/or TIMP-2;
[3353] (iii) Axl, TSH, MPIF-1, PPP, Vaspin, IL-7, PARC, CA-15-3, and/or LDH;
[3354] (iv) Axl, TSH, MPIF-1, PPP, Vaspin, IL-7, PARC, and/or CA-15-3;
[3355] (v) Axl, PGI, Apo E, Apo C-I, MSP, CCL15, Progranulin, CEACAM1, VDBP, CA-9, and/or LDH; or
[3356] (vi) Axl, PGI, Apo E, Apo C-I, MSP, CCL15, Progranulin, CEACAM1, VDBP, and/or CA-9.

[3357] In some embodiments the method may be as defined in accordance with the above described first and second aspects of this facet of the disclosure.

[3358] Uses

[3359] A seventh aspect of this facet of the present disclosure relates to the use of one or more of: Axl, AB-40, Aggrecan, FRTN, RAGE, Nr-CAM, Sclerostin, PSA-f, EGFR, NF-H, DBH, Fib-1C, Myoglobin, uPA, Vaspin, IL-23, A2Macro, TIMP-2, TSH, MPIF-1, PPP, IL-7, PARC, CA-15-3, PGI, Apo E, Apo C-I, MSP, CCL15, Progranulin, CEACAM1, VDBP, CA-9, and/or LDH as a biomarker for determining if a subject is susceptible to treatment with an agent capable of inhibiting or reversing EMT or a chemotherapeutic agent.

[3360] In some embodiments the use relates to use of Axl, and at least 1, 2, 3, 4, 5, 6, 7, 8, 9, 10, or more of: AB-40, Aggrecan, FRTN, RAGE, Nr-CAM, Sclerostin, PSA-f, EGFR, NF-H, DBH, Fib-1C, Myoglobin, uPA, Vaspin, IL-23, A2Macro, TIMP-2, TSH, MPIF-1, PPP, IL-7, PARC, CA-15-3, PGI, Apo E, Apo C-I, MSP, CCL15, Progranulin, CEACAM1, VDBP, CA-9, and/or LDH, as a biomarker for determining if a subject is susceptible to treatment with an agent capable of inhibiting or reversing EMT or a chemotherapeutic agent. In some embodiments the use relates to use of LDH, and at least 1, 2, 3, 4, 5, 6, 7, 8, 9, 10, or more of: Axl, AB-40, Aggrecan, FRTN, RAGE, Nr-CAM, Sclerostin, PSA-f, EGFR, NF-H, DBH, Fib-1C, Myoglobin, uPA, Vaspin, IL-23, A2Macro, TIMP-2, TSH, MPIF-1, PPP, IL-7, PARC, CA-15-3, PGI, Apo E, Apo C-I, MSP, CCL15, Progranulin, CEACAM1, VDBP, and/or CA-9, as a biomarker for determining if a subject is susceptible to treatment with an agent capable of inhibiting or reversing EMT or a chemotherapeutic agent.

[3361] In some embodiments the use relates to use of Axl, LDH, and at least 1, 2, 3, 4, 5, 6, 7, 8, 9, 10, or more of: AB-40, Aggrecan, FRTN, RAGE, Nr-CAM, Sclerostin, PSA-f, EGFR, NF-H, DBH, Fib-1C, Myoglobin, uPA, Vaspin, IL-23, A2Macro, TIMP-2, TSH, MPIF-1, PPP, IL-7, PARC, CA-15-3, PGI, Apo E, Apo C-I, MSP, CCL15, Progranulin, CEACAM1, VDBP, and/or CA-9, as a biomarker for determining if a subject is susceptible to treatment with an agent capable of inhibiting or reversing EMT or a chemotherapeutic agent.

[3362] In some embodiments the one or more biomarker is selected from the group consisting of:
[3363] (i) Axl, AB-40, Aggrecan, FRTN, RAGE, Nr-CAM, Sclerostin, PSA-f, EGFR, NF-H, DBH, Fib-1C, Myoglobin, uPA, Vaspin, IL-23, A2Macro, TIMP-2, and/or LDH;
[3364] (ii) Axl, AB-40, Aggrecan, FRTN, RAGE, Nr-CAM, Sclerostin, PSA-f, EGFR, NF-H, DBH, Fib-1C, Myoglobin, uPA, Vaspin, IL-23, A2Macro, and/or TIMP-2;
[3365] (iii) Axl, TSH, MPIF-1, PPP, Vaspin, IL-7, PARC, CA-15-3, and/or LDH;
[3366] (iv) Axl, TSH, MPIF-1, PPP, Vaspin, IL-7, PARC, and/or CA-15-3;
[3367] (v) Axl, PGI, Apo E, Apo C-I, MSP, CCL15, Progranulin, CEACAM1, VDBP, CA-9, and/or LDH; or
[3368] (vi) Axl, PGI, Apo E, Apo C-I, MSP, CCL15, Progranulin, CEACAM1, VDBP, and/or CA-9.

[3369] In some preferred embodiments the one or more biomarker is Axl. In some preferred embodiments the one or more biomarker is CA-9. In some preferred embodiments the one or more biomarker is LDH. In some preferred embodiments the one or more biomarker is Axl and CA-9. In some preferred embodiments the one or more biomarker is Axl and LDH. In some preferred embodiments the one or more biomarker is CA-9 and LDH. In some preferred embodiments the one or more biomarker is Axl, CA-9, and LDH.

[3370] In other preferred embodiments the one or more biomarker is Axl, and at least 1, 2, 3, 4, 5, 6, 7, 8, 9, 10, 11, 12, 13, 14, 15, 20 further biomarkers described herein. In some other preferred embodiments the one or more biomarker is CA-9, and at least 1, 2, 3, 4, 5, 6, 7, 8, 9, 10, 11, 12, 13, 14, 15, 20 further biomarkers described herein. In some other preferred embodiments the one or more biomarker is LDH, and at least 1, 2, 3, 4, 5, 6, 7, 8, 9, 10, 11, 12, 13, 14, 15, 20 further biomarkers described herein. In some other preferred embodiments the one or more biomarker is Axl, CA-9, and at least 1, 2, 3, 4, 5, 6, 7, 8, 9, 10, 11, 12, 13, 14, 15, 20 further biomarkers described herein. In some other preferred embodiments the one or more biomarker is Axl, LDH, and at least 1, 2, 3, 4, 5, 6, 7, 8, 9, 10, 11, 12, 13, 14, 15, 20 further biomarkers described herein. In some other preferred embodiments the one or more biomarker is CA-9, LDH, and at least 1, 2, 3, 4, 5, 6, 7, 8, 9, 10, 11, 12, 13, 14, 15, 20 further biomarkers described herein. In some other preferred embodiments the one or more biomarker is Axl, CA-9, LDH, and at least 1, 2, 3, 4, 5, 6, 7, 8, 9, 10, 11, 12, 13, 14, 15, 20 further biomarkers described herein.

[3371] In some embodiments the use is as a biomarker in a method as defined in accordance with the above described first and second aspects of this facet of the disclosure.

[3372] Methods of Treating a Subject

[3373] A eighth aspect of this facet of the present disclosure relates to methods of treating a subject having, suspected of having, or diagnosed with non-small cell lung cancer (NSCLC). In some embodiments the method comprises: identifying a subject for treatment using a predictive method defined in accordance with the above described first and second aspects of this facet of the disclosure; and, administering to the subject a therapeutically effective amount of an agent capable of inhibiting or reversing EMT or a chemotherapeutic agent.

[3374] Accordingly, in some embodiments, the method comprises: (a) obtaining a sample from the subject; (b) determining if the subject is susceptible to treatment with an agent capable of inhibiting or reversing EMT or a chemotherapeutic agent using a predictive method defined in accordance with the above described first and second aspects of this facet of the disclosure; and, (c) administering to the subject a therapeutically effective amount of an agent capable of inhibiting or reversing EMT or a chemotherapeutic agent.

[3375] In some embodiments the method comprises administering a therapeutically effective amount of an agent capable of inhibiting or reversing EMT or chemotherapeutic agent to a subject identified as susceptible to said treatment using a predictive method defined in accordance with the above described first and second aspects of this facet of the disclosure.

[3376] In other embodiments the method comprises: (a) administering to a subject a therapeutically effective amount of an agent capable of inhibiting or reversing EMT or a chemotherapeutic agent; and, (b) determining if the subject is susceptible to said treatment using a predictive method defined in accordance with the above described second aspect of this facet of the disclosure. In some embodiments the method further comprises: (c) administering to the subject one or more further therapeutically effective amounts of an agent capable of inhibiting or reversing EMT or a chemotherapeutic agent provided that the subject is identified as susceptible to said treatment.

[3377] A ninth aspect of this facet of the present disclosure relates to an agent capable of inhibiting or reversing EMT or chemotherapeutic agent for use in a method of treating a subject having, suspected of having, or diagnosed with non-small cell lung cancer (NSCLC). In some embodiments the method of treatment is a method as defined above.

[3378] A tenth aspect of this facet of the present disclosure relates to use of an agent capable of inhibiting or reversing EMT or chemotherapeutic agent for use in a method of manufacture of a medicament for use in a method of treating a subject having, suspected of having, or diagnosed with non-small cell lung cancer (NSCLC). In some embodiments the method of treatment is a method as defined above.

[3379] In some embodiments of these methods, agents for use, or uses, the agent capable of inhibiting or reversing EMT or chemotherapeutic agent comprises an Axl inhibitor, Akt3 inhibitor, Slfn11 inhibitor, or PHGDH inhibitor. In some preferred embodiments the agent capable of inhibiting or reversing EMT or chemotherapeutic agent is an Axl inhibitor, for example BGB324/R428/bemcentinib, cabozantinib, TP-0903, foretinib, merestinib, bosutinib, gilteritinib, crizotinib, amuvatinib, sunitinib, sitravatinib, LDC1267, or UNC2025. Other Axl inhibitors include the anti-Axl antibodies described in WO2015/193428, WO2015/193430, WO2016/097370, and WO2016/166296. In some preferred embodiments the Axl inhibitor is an anti-Axl antibody described in WO2015/193428, WO2015/193430, WO2016/097370, or WO2016/166296. In some particularly preferred embodiments the Axl inhibitor is BGB324/R428/bemcentinib.

[3380] In some other preferred embodiments, the treatment comprises an Akt3 inhibitor. In some embodiments the Akt3 inhibitor is an Akt3 inhibitor disclosed in WO2016/102672.

[3381] In some embodiments of these methods, agents for use, or uses, the treatment is administered as a single agent. In other embodiments, the treatment is administered in combination with a further cancer treatment. Suitable further cancer treatments are outlined in detail above.

[3382] In some preferred embodiments the further cancer treatment is a PD-1 inhibitor or PD-L1 inhibitor. In some embodiments the further cancer treatment is a monoclonal antibody such as pembrolizumab, alemtuzumab, bevacizumab, cetuximab, ibritumomab, tiuxetan, or rituximab. In some preferred embodiments the further cancer treatment is a microtubule polymer stabilizer such as the taxanes paclitaxel and docetaxel. In some preferred embodiments the further cancer treatment is a tyrosine kinase inhibitor such as erlotinib hydrochloride, gefitinib, imatinib mesylate, and semaxanib. In some particularly preferred embodiments the further cancer treatment is pembrolizumab. In other particularly preferred embodiments the further cancer treatment is docetaxel. In yet other particularly preferred embodiments the further cancer treatment is erlotinib.

[3383] Statements of Disclosure

[3384] The following numbered statements relate to aspects of this facet of the present disclosure, and form part of the description:
[3385] 101. A method of predicting a cancer-related outcome in a subject, the method comprising assessing the activity, expression, or amount of one or more biomarker in the subject, or in a sample derived from the subject;
   [3386] wherein the one or more biomarker is selected from the group consisting of: Axl, AB-40, Aggrecan, FRTN, RAGE, Nr-CAM, Sclerostin, PSA-f, EGFR, NF-H, DBH, Fib-1C, Myoglobin, uPA, Vaspin, IL-23, A2Macro, TIMP-2, TSH, MPIF-1, PPP, IL-7, PARC, CA-15-3, PGI, Apo E, Apo C-I, MSP, CCL15, Progranulin, CEACAM1, VDBP, CA-9, and/or LDH; and
   [3387] wherein the subject has, is suspected of having, or has been diagnosed with non-small cell lung cancer (NSCLC).
[3388] 102. A method according to statement 101, wherein the method comprises:
   [3389] assessing the activity, expression, or amount of one or more biomarker in the subject, or in a sample derived from the subject, to obtain a sample profile of the one or more biomarker; and
   [3390] making a prediction based on the sample profile of the one or more biomarker.
[3391] 103. A method according to statement 102, wherein the prediction is made by comparing the sample profile to a control profile.
[3392] 104. A method according to statement 103, wherein the sample profile is obtained before the subject is contacted with or administered an agent capable of inhibiting or reversing EMT or a chemotherapeutic agent.
[3393] 105. A method according to statement 104, wherein the control profile is:
   [3394] (i) obtained from a population of control subjects having NSCLC; or
   [3395] (ii) obtained from a control subject or population of control subjects having NSCLC and previously found to lack susceptibility to treatment with an agent capable of inhibiting or reversing EMT or a chemotherapeutic agent (that is, non-responder subjects);
   [3396] (iii) a predetermined profile of biomarker expression, activity, or amount values, for example a profile of “average, median, or mean” values or “standard ranges” of values, obtained from a control subject or population of control subjects having NSCLC and previously found to lack susceptibility to treatment with an agent capable of inhibiting or reversing EMT or a chemotherapeutic agent (that is, non-responder subjects);
   [3397] (iv) obtained from a control sample having a known “average, median, or mean” value of biomarkers indicative of a control subject or population of control subjects having NSCLC and previously found to lack susceptibility to treatment with an agent capable of inhibiting or reversing EMT or a chemotherapeutic agent (that is, non-responder subjects);
   [3398] (v) a predetermined profile of biomarker expression, activity, or amount “threshold” values obtained from a control subject or population of control subjects having NSCLC and previously found to be susceptible to treatment with an agent capable of inhibiting or reversing EMT or a chemotherapeutic agent (that is, responder subjects); or
   [3399] (vi) obtained from a control sample having a known “threshold” value of biomarkers indicative of a control subject or population of control subjects having NSCLC and previously found to be susceptible to treatment with an agent capable of inhibiting or reversing EMT or a chemotherapeutic agent (that is, responder subjects).
[3400] 106. A method according to statement 105, wherein a higher activity, expression, or amount of one or more biomarker in the sample profile as compared with the control profile is indicative of susceptibility to treatment with an agent capable of inhibiting or reversing EMT or a chemotherapeutic agent.
[3401] 107. A method according to statement 105, wherein a lower activity, expression, or amount of one or more biomarker in the sample profile as compared with the control profile is indicative of susceptibility to treatment with an agent capable of inhibiting or reversing EMT or a chemotherapeutic agent.
[3402] 108. A method according to any one of statements 105-107, wherein the one or more biomarker includes at least one of: Nr-CAM, Sclerostin, PSA-f, EGFR, NF-H, DBH, Fib-1C, Myoglobin, uPA, Vaspin, IL-23, A2Macro, TIMP-2, MPIF-1, PPP, IL-7, PARC, CA-15-3, VDBP, CA-9, and/or LDH
   [3403] and wherein a higher activity, expression, or amount of one or more of said biomarkers in the sample profile as compared with the control profile is indicative of susceptibility to treatment with an agent capable of inhibiting or reversing EMT or a chemotherapeutic agent.
[3404] 109. A method according to any one of statements 105-108, wherein the one or more biomarker includes at least one of: Axl, AB-40, Aggrecan, FRTN, RAGE, TSH, Tetranectin, PGI, Apo E, Apo C-I, MSP, CCL15, Progranulin, CEACAM1, and/or LDH,
   [3405] and wherein a lower activity, expression, or amount of one or more of said biomarkers in the sample profile as compared with the control profile is indicative of susceptibility to treatment with an agent capable of inhibiting or reversing EMT or a chemotherapeutic agent.
[3406] 110. A method according to any one of statements 101-109, wherein the one or more biomarker comprises a group of biomarkers selected from:
   [3407] (i) Axl, AB-40, Aggrecan, FRTN, RAGE, Nr-CAM, Sclerostin, PSA-f, EGFR, NF-H, DBH, Fib-1C, Myoglobin, uPA, Vaspin, IL-23, A2Macro, TIMP-2, and/or LDH;
   [3408] (ii) Axl, TSH, MPIF-1, PPP, Vaspin, IL-7, PARC, CA-15-3, and/or LDH; or
   [3409] (iii) Axl, PGI, Apo E, Apo C-I, MSP, CCL15, Progranulin, CEACAM1, VDBP, CA-9, and/or LDH.
[3410] 111. A method according to any one of statements 101-110, wherein the one or more biomarker comprises Axl, and/or CA-9, and/or LDH, optionally wherein
   [3411] (a) the one or more biomarker comprises Axl and at least 1, 2, 3, 4, 5, 6, 7, 8, 9, 10, or more further biomarkers selected from:
      [3412] (i) AB-40, Aggrecan, FRTN, RAGE, Nr-CAM, Sclerostin, PSA-f, EGFR, NF-H, DBH, Fib-1C, Myoglobin, uPA, Vaspin, IL-23, A2Macro, TIMP-2, and/or LDH;
      [3413] (ii) TSH, MPIF-1, PPP, Vaspin, IL-7, PARC, CA-15-3, and/or LDH; or
      [3414] (iii) PGI, Apo E, Apo C-I, MSP, CCL15, Progranulin, CEACAM1, VDBP, CA-9, and/or LDH;
   [3415] (b) the one or more biomarker comprises CA-9 and at least 1, 2, 3, 4, 5, 6, 7, 8, 9, 10, or more further biomarkers selected from: Axl, PGI, Apo E, Apo C-I, MSP, CCL15, Progranulin, CEACAM1, and/or VDBP; or
   [3416] (c) the one or more biomarker comprises Axl, CA-9, and at least 1, 2, 3, 4, 5, 6, 7, 8, 9, 10, or more further biomarkers selected from: PGI, Apo E, Apo C-I, MSP, CCL15, Progranulin, CEACAM1, and/or VDBP.
[3417] 112. A method according to any one of statements 101-111, wherein:
   [3418] said Axl biomarker comprises an amino acid sequence having at least 70%, 80%, 90%, 95%, 99% or 100% sequence identity with the full-length of the amino acid sequence disclosed at UniProt accession no: P30530-1 or P30530-2 (entry version 196) or a fragment thereof;
   [3419] said Beta Amyloid 1-40 (AB-40) biomarker comprises an amino acid sequence having at least 70%, 80%, 90%, 95%, 99% or 100% sequence identity with the full-length of the amino acid sequence disclosed at UniProt accession no: P05067-1, P05067-2, P05067-3, P05067-4, P05067-5, P05067-6, P05067-7, P05067-8, P05067-9, P05067-10, or P05067-11 (entry version 271) or a fragment thereof;
   [3420] said Aggrecan core protein (Aggrecan) biomarker comprises an amino acid sequence having at least 70%, 80%, 90%, 95%, 99% or 100% sequence identity with the full-length of the amino acid sequence disclosed at UniProt accession no: P16112-1, P16112-2, or P16112-3 (entry version 197) or a fragment thereof;
   [3421] said Ferritin (FRTN) biomarker comprises an amino acid sequence having at least 70%, 80%, 90%, 95%, 99% or 100% sequence identity with the full-length of the amino acid sequence disclosed at UniProt accession no: P02794 (entry version 213) or a fragment thereof;
   [3422] said Receptor for advanced glycosylation end products (RAGE) biomarker comprises an amino acid sequence having at least 70%, 80%, 90%, 95%, 99% or 100% sequence identity with the full-length of the amino acid sequence disclosed at UniProt accession no: Q15109-1, Q15109-2, Q15109-3, Q15109-4, Q15109-5, Q15109-6, Q15109-7, Q15109-8, Q15109-9, Q15109-10 (entry version 189) or a fragment thereof;
   [3423] said Neuronal Cell Adhesion Molecule (Nr-CAM) biomarker comprises an amino acid sequence having at least 70%, 80%, 90%, 95%, 99% or 100% sequence identity with the full-length of the amino acid sequence disclosed at UniProt accession no: Q92823-1, Q92823-2, Q92823-3, Q92823-4, Q92823-5, or Q92823-6 (entry version 172) or a fragment thereof;
   [3424] said Sclerostin biomarker comprises an amino acid sequence having at least 70%, 80%, 90%, 95%, 99% or 100% sequence identity with the full-length of the amino acid sequence disclosed at UniProt accession no: Q9BQB4-1 or Q9BQB4-2 (entry version 145) or a fragment thereof;
   [3425] said Prostate-Specific Antigen, Free (PSA-f) biomarker comprises an amino acid sequence having at least 70%, 80%, 90%, 95%, 99% or 100% sequence identity with the full-length of the amino acid sequence disclosed at UniProt accession no: P07288-1, P07288-2, P07288-3, P07288-4, or P07288-5 (entry version 197) or a fragment thereof;
   [3426] said Epidermal Growth Factor Receptor (EGFR) biomarker comprises an amino acid sequence having at least 70%, 80%, 90%, 95%, 99% or 100% sequence identity with the full-length of the amino acid sequence disclosed at UniProt accession no: Q504U8 (entry version 138) or a fragment thereof;
   [3427] said Neurofilament heavy polypeptide (NF-H) biomarker comprises an amino acid sequence having at least 70%, 80%, 90%, 95%, 99% or 100% sequence identity with the full-length of the amino acid sequence disclosed at UniProt accession no: P12036-1 or P12036-2 (entry version 177) or a fragment thereof;
   [3428] said Dopamine beta-hydroxylase (DBH) biomarker comprises an amino acid sequence having at least 70%, 80%, 90%, 95%, 99% or 100% sequence identity with the full-length of the amino acid sequence disclosed at UniProt accession no: P09172 (entry version 194) or a fragment thereof;
   [3429] said Fibulin-1C (Fib-1C) biomarker comprises an amino acid sequence having at least 70%, 80%, 90%, 95%, 99% or 100% sequence identity with the full-length of the amino acid sequence disclosed at UniProt accession no: P23142-1, P23142-2, P23142-3, or P23142-4 (entry version 217) or a fragment thereof;
   [3430] said Myoglobin biomarker comprises an amino acid sequence having at least 70%, 80%, 90%, 95%, 99% or 100% sequence identity with the full-length of the amino acid sequence disclosed at UniProt accession no: P02144 (entry version 178) or a fragment thereof;
   [3431] said Urokinase-type Plasminogen Activator (uPA) biomarker comprises an amino acid sequence having at least 70%, 80%, 90%, 95%, 99% or 100% sequence identity with the full-length of the amino acid sequence disclosed at UniProt accession no: P00749-1 or P00749-2 (entry version 230) or a fragment thereof;
   [3432] said Visceral adipose tissue-derived serpin A12 (Vaspin) biomarker comprises an amino acid sequence having at least 70%, 80%, 90%, 95%, 99% or 100% sequence identity with the full-length of the amino acid sequence disclosed at UniProt accession no: Q8IW75 (entry version 122) or a fragment thereof;
   [3433] said Interleukin-23 (IL-23) biomarker comprises an amino acid sequence having at least 70%, 80%, 90%, 95%, 99% or 100% sequence identity with the full-length of the amino acid sequence disclosed at UniProt accession no: Q9NPF7 (entry version 133) or a fragment thereof;
   [3434] said Alpha-2-Macroglobulin (A2Macro) biomarker comprises an amino acid sequence having at least 70%, 80%, 90%, 95%, 99% or 100% sequence identity with the full-length of the amino acid sequence disclosed at UniProt accession no: P01023 (entry version 206) or a fragment thereof;
   [3435] said Tissue Inhibitor of Metalloproteinases 2 (TIMP-2) biomarker comprises an amino acid sequence having at least 70%, 80%, 90%, 95%, 99% or 100% sequence identity with the full-length of the amino acid sequence disclosed at UniProt accession no: P16035 (entry version 187) or a fragment thereof;
   [3436] said Thyroid-Stimulating Hormone (TSH) biomarker comprises an amino acid sequence having at least 70%, 80%, 90%, 95%, 99% or 100% sequence identity with the full-length of the amino acid sequence disclosed at UniProt accession no: P01222-1 or P01222-2 (entry version 161) or a fragment thereof;
   [3437] said Tetranectin biomarker comprises an amino acid sequence having at least 70%, 80%, 90%, 95%, 99% or 100% sequence identity with the full-length of the amino acid sequence disclosed at UniProt accession no: P05452 (entry version 177) or a fragment thereof;
   [3438] said Myeloid Progenitor Inhibitory Factor 1 (MPIF-1) biomarker comprises an amino acid sequence having at least 70%, 80%, 90%, 95%, 99% or 100% sequence identity with the full-length of the amino acid sequence disclosed at UniProt accession no: P55773-1 or P55773-2 (entry version 162) or a fragment thereof;
   [3439] said Pancreatic Polypeptide (PPP) biomarker comprises an amino acid sequence having at least 70%, 80%, 90%, 95%, 99% or 100% sequence identity with the full-length of the amino acid sequence disclosed at UniProt accession no: P01298-1 or P01298-2 (entry version 175) or a fragment thereof;
   [3440] said Interleukin-7 (IL-7) biomarker comprises an amino acid sequence having at least 70%, 80%, 90%, 95%, 99% or 100% sequence identity with the full-length of the amino acid sequence disclosed at UniProt accession no: P13232-1, P13232-2, or P13232-3 (entry version 170) or a fragment thereof;
   [3441] said Pulmonary and Activation-Regulated Chemokine (PARC) biomarker comprises an amino acid sequence having at least 70%, 80%, 90%, 95%, 99% or 100% sequence identity with the full-length of the amino acid sequence disclosed at UniProt accession no: P55774 (entry version 152) or a fragment thereof;
   [3442] said Cancer Antigen 15-3 (CA-15-3) biomarker comprises an amino acid sequence having at least 70%, 80%, 90%, 95%, 99% or 100% sequence identity with the full-length of the amino acid sequence disclosed at UniProt accession no: P15941-1, P15941-2, P15941-3, P15941-4, P15941-5, P15941-6, P15941-7, P15941-8, P15941-9, P15941-10, P15941-11, P15941-12, P15941-13, P15941-14, P15941-15, P15941-16, or P15941-17 (entry version 204) or a fragment thereof;
   [3443] said Pepsinogen I (PGI) biomarker comprises an amino acid sequence having at least 70%, 80%, 90%, 95%, 99% or 100% sequence identity with the full-length of the amino acid sequence disclosed at UniProt accession no: P0DJD8 (entry version 50) or a fragment thereof;
   [3444] said Apolipoprotein E (Apo E) biomarker comprises an amino acid sequence having at least 70%, 80%, 90%, 95%, 99% or 100% sequence identity with the full-length of the amino acid sequence disclosed at UniProt accession no: P02649 (entry version 230) or a fragment thereof;
   [3445] said Apolipoprotein C-I (Apo C-I) biomarker comprises an amino acid sequence having at least 70%, 80%, 90%, 95%, 99% or 100% sequence identity with the full-length of the amino acid sequence disclosed at UniProt accession no: P02654 (entry version 175) or a fragment thereof;
   [3446] said Macrophage-Stimulating Protein (MSP) biomarker comprises an amino acid sequence having at least 70%, 80%, 90%, 95%, 99% or 100% sequence identity with the full-length of the amino acid sequence disclosed at UniProt accession no: P26927 (entry version 179) or a fragment thereof;
   [3447] said C-C motif chemokine 15 (CCL15) biomarker comprises an amino acid sequence having at least 70%, 80%, 90%, 95%, 99% or 100% sequence identity with the full-length of the amino acid sequence disclosed at UniProt accession no: Q16663 (entry version 161) or a fragment thereof;
   [3448] said Progranulin biomarker comprises an amino acid sequence having at least 70%, 80%, 90%, 95%, 99% or 100% sequence identity with the full-length of the amino acid sequence disclosed at UniProt accession no: P28799-1, P28799-2, or P28799-3 (entry version 197) or a fragment thereof;
   [3449] said Carcinoembryonic antigen-related cell adhesion molecule 1 (CEACAM1) biomarker comprises an amino acid sequence having at least 70%, 80%, 90%, 95%, 99% or 100% sequence identity with the full-length of the amino acid sequence disclosed at UniProt accession no: P13688-1, P13688-2, P13688-3, P13688-4, P13688-5, P13688-6, P13688-7, P13688-8, P13688-9, P13688-10, or P13688-11 (entry version 197) or a fragment thereof;
   [3450] said Vitamin D-Binding Protein (VDBP) biomarker comprises an amino acid sequence having at least 70%, 80%, 90%, 95%, 99% or 100% sequence identity with the full-length of the amino acid sequence disclosed at UniProt accession no: P02774-1, P02774-2, or P02774-3 (entry version 201) or a fragment thereof;
   [3451] said Carbonic anhydrase 9 (CA-9) biomarker comprises an amino acid sequence having at least 70%, 80%, 90%, 95%, 99% or 100% sequence identity with the full-length of the amino acid sequence disclosed at UniProt accession no: Q16790 (entry version 171) or a fragment thereof;
   [3452] said Lactate Dehydrogenase (LDH) biomarker comprises an amino acid sequence having at least 70%, 80%, 90%, 95%, 99% or 100% sequence identity with the full-length of the amino acid sequence disclosed at UniProt accession no: P00338-1, P00338-2, P00338-3, P00338-4, or P00338-5 (entry version 224) or a fragment thereof; and/or
   [3453] said Lactate Dehydrogenase (LDH) biomarker comprises an amino acid sequence having at least 70%, 80%, 90%, 95%, 99% or 100% sequence identity with the full-length of the amino acid sequence disclosed at UniProt accession no: P07195-1 (entry version 218) or a fragment thereof;
   [3454] or a nucleic acid (either DNA or RNA) having at least 70%, 80%, 90%, 95%, 99% or 100% sequence identity with the full-length nucleic acid sequence encoding said amino acid sequences.
[3455] 113. A method according to any one of statement 101-112, wherein the method comprises determining the amount of at least 2, 3, 4, 5, 6, 7, 8, 9, 10, 11, 12, 13, 14, 15, 20 of said biomarkers in the subject, or sample derived from the subject.
[3456] 114. A method according to any one of statements 104-113, wherein assessing the activity, expression, or amount of one or more biomarker in the subject, or in a sample derived from the subject, comprises:
   [3457] contacting a sample, or an extract from the sample, with at least 1, 2, 3, 4, 5, 6, 7, 8, 9, 10 or more reagents for detecting the activity, expression, or amount of one or more biomarkers, each of which is selective for a particular biomarker; and
   [3458] detecting and/or quantifying said reagents for detecting.
[3459] 115. A method according to statement 114, wherein assessing the expression or amount of one or more biomarker in the subject, or in a sample derived from the subject, comprises:
   [3460] contacting a sample, or an extract from the sample, with at least 1, 2, 3, 4, 5, 6, 7, 8, 9, 10 or more specific binding members, each of which selectively binds to a respective biomarker protein or mRNA; and
   [3461] detecting and/or quantifying formation of complex formed by said specific binding member and said biomarker protein or mRNA.
[3462] 116. A method according to statement 115 wherein the specific binding member comprises an antibody molecule or binding fragment thereof.
[3463] 117. A method according to statement 115 or 116, wherein detecting formation of a complex formed by the specific binding member and the biomarker protein or mRNA is carried out by use of a technique selected from: Western blot; enzyme-linked immunosorbent assay (ELISA); radioimmunoassay (RIA); competitive enzyme immunoassay; double antibody sandwich ELISA (DAS-ELISA); liquid immunoarray technology; immunocytochemistry; immunohistochemistry; antibody microarray detection; precipitation of colloidal gold; affinity chromatography; ligand binding assay; and lectin binding assay.
[3464] 118. A method according to any one of statements 115-117 wherein the expression or amount of the one or more biomarker is determined as the absolute amount of the respective biomarker protein or mRNA in the sample.
[3465] 119. A method according to any one of statements 115-117 wherein the expression or amount of the one or more biomarker is determined as a relative amount of the respective biomarker protein or mRNA in the sample,
   [3466] optionally wherein the relative amount is determined relative to a reference protein or mRNA in the sample, the expression of which is not altered by NSCLC.
[3467] 120. A method according to any one of statements 101-119, wherein the cancer-related outcome is susceptibility to treatment with an agent capable of inhibiting or reversing EMT or a chemotherapeutic agent.
[3468] 121. A method according to statement 120, wherein the agent capable of inhibiting or reversing EMT or chemotherapeutic agent is an Axl inhibitor, Akt3 inhibitor, Slfn11 inhibitor, or PHGDH inhibitor.
[3469] 122. A method according to statement 121, wherein the agent capable of inhibiting or reversing EMT or chemotherapeutic agent is an Axl inhibitor.
[3470] 123. A method according to statement 122, wherein the Axl inhibitor is BGB324/R428/bemcentinib, cabozantinib, TP-0903, foretinib, merestinib, bosutinib, gilteritinib, crizotinib, amuvatinib, sunitinib, sitravatinib, LDC1267, UNC2025, or an anti-Axl antibody described in WO2015/193428, WO2015/193430, WO2016/097370, or WO2016/166296.
[3471] 124. A method according to statement 123, wherein the Axl inhibitor is BGB324/R428/bemcentinib.
[3472] 125. A method according to statement 123, wherein the Axl inhibitor is an anti-Axl antibody described in WO2015/193428, WO2015/193430, WO2016/097370, or WO2016/166296.
[3473] 126. A method according to statement 121, wherein the agent capable of inhibiting or reversing EMT or chemotherapeutic agent is an Akt3 inhibitor.
[3474] 127. A method according to statement 126, wherein the Akt3 inhibitor is an Akt3 inhibitor disclosed in WO2016/102672.
[3475] 128. A method according to any one of statements 120-127, wherein the agent capable of inhibiting or reversing EMT is administered as a single agent.
[3476] 129. A method according to any one of statements 120-127, wherein the agent capable of inhibiting or reversing EMT is administered in combination with a further cancer treatment.
[3477] 130. A method according to statement 129, wherein the further cancer treatment is selected from:
   [3478] (i) alkylating agents, including alkyl sulfonates such as busulfan;
   [3479] (ii) nitrogen mustards such as chlorambucil, cyclophosphamide, estramustine, ifosfamide, mechlorethamine, melphalan, and uramustine;
   [3480] (iii) ethyleneimine derivatives such as thiotepa;
   [3481] (iv) nitrosoureas such as carmustine, lomustine, and streptozocin;
   [3482] (v) triazenes such as dacarbazine, procarbazine, and temozolamide;
   [3483] (vi) platinum compounds such as cisplatin, carboplatin, oxaliplatin, satraplatin, and picoplatin onnaplatin, tetraplatin, sprioplatin, iproplatin, chloro(diethylenediamino)-platinum (II) chloride, dichloro(ethylenediamino)-platinum (II), diamino(2-ethylmalonato)platinum (II), (1,2-diaminocyclohexane)malonatoplatinum (II), (4-carboxyphthalo)-(1,2-diaminocyclohexane)platinum (II), (1,2-diaminocyclohexane)-(isocitrato)platinum (II), and (1,2-diaminocyclohexane)-cis-(pyruvato)platinum (II);
   [3484] (vii) antimetabolites, including antifolates such as methotrexate, permetrexed, raltitrexed, and trimetrexate;
   [3485] (viii) pyrimidine analogues such as azacitidine, capecitabine, cytarabine, edatrexate, floxuridine, fluorouracil, gemcitabine, and troxacitabine;
   [3486] (ix) purine analogues such as cladribine, chlorodeoxyadenosine, clofarabine, fludarabine, mercaptopurine, pentostatin, and thioguanine;
   [3487] (x) natural products, including antitumor antibiotics such as bleomycin, dactinomycin, mithramycin, mitomycin, mitoxantrone, porfiromycin;
   [3488] (xi) anthracyclines such as daunorubicin, doxorubicin, epirubicin, idarubicin, and valrubicin;
   [3489] (xii) mitotic inhibitors such as the vinca alkaloids vinblastine, vinvesir, vincristine, vindesine, and vinorelbine;
   [3490] (xiii) enzymes such as L-asparaginase and PEG-L-asparaginase;
   [3491] (xiv) microtubule polymer stabilizers such as the taxanes paclitaxel and docetaxel;
   [3492] (xv) topoisomerase I inhibitors such as the camptothecins irinotecan and topotecan;
   [3493] (xvi) topoisomerase II inhibitors such as podophyllotoxin, amsacrine, etoposide, teniposide, losoxantrone and actinomycin;
   [3494] (xvii) hormones and hormone antagonists, including
      [3495] androgens such as fluoxymesterone and testolactone;
      [3496] antiandrogens such as bicalutamide, cyproterone, flutamide, and nilutamide;
      [3497] corticosteroids such as dexamethasone and prednisone;
      [3498] aromatase inhibitors such as aminoglutethimide, anastrozole, exemestane, formestane, and letrozole;
      [3499] estrogens such as diethylstilbestrol;
      [3500] antiestrogens such as fulvestrant, raloxifene, tamoxifen, and toremifine;
      [3501] luteinising hormone-releasing hormone (LHRH) agonists and antagonists such as abarelix, buserelin, goserelin, leuprolide, histrelin, desorelin, nafarelin acetate and triptorelin;
      [3502] progestins such as medroxyprogesterone acetate and megestrol acetate; and
      [3503] thyroid hormones such as levothyroxine and liothyronine;
   [3504] (xviii) PKB pathway inhibitors, including perifosine, enzastaurin hydrochloride, and triciribine;
   [3505] (xix) P13K inhibitors such as semaphore and SF1126, and MTOR inhibitors such as rapamycin and analogues;
   [3506] (xx) CDK inhibitors, including seliciclib, alvocidib, and 7-hydroxystaurosporine;
   [3507] (xxi) COX-2 inhibitors, including celecoxib;
   [3508] (xxii) HDAC inhibitiors, including trichostatin A, suberoylanilide hydroxamic acid, and chlamydocin;
   [3509] (xxiii) DNA methylase inhibitors, including temozolomide, and miscellaneous agents, including altretamine, arsenic trioxide, thalidomide, lenalidomide, gallium nitrate, levamisole, mitotane, hydroxyurea, octreotide, procarbazine, suramin, photodynamic compounds such as methoxsalen and sodium porfimer;
   [3510] (xxiv) proteasome inhibitors such as bortezomib;
   [3511] (xxv) molecular targeted therapy agents including: functional therapeutic agents, including gene therapy agents and antisense therapy agents;
   [3512] (xxvi) tyrosine kinase inhibitors such as erlotinib hydrochloride, gefitinib, imatinib mesylate, and semaxanib;
   [3513] (xxvii) Raf inhibitors such as sorafenib, and gene expression modulators such as the retinoids and rexinoids, for example adapalene, bexarotene, trans-retinoic acid, 9-cis-retinoic acid, and N-(4-hydroxyphenyl)retinamide;
   [3514] (xxviii) phenotype-directed therapy agents, including monoclonal antibodies such as pembrolizumab, alemtuzumab, bevacizumab, cetuximab, ibritumomab tiuxetan, rituximab, and trastuzumab, immunotoxins such as gemtuzumab ozogamicin, radioimmunoconjugates such as I-tositumobab;
   [3515] (xxix) cancer vaccines;
   [3516] (xxx) biologic therapy agents including: interferons such as interferon-[alpha]2a and interferon-[alpha]2b, and interleukins such as aldesleukin, denileukin diftitox, and oprelvekin;
   [3517] (xxxi) anticancer therapies involving the use of protective or adjunctive agents, including: cytoprotective agents such as amifostine, and dexrazoxane, phosphonates such as pamidronate and zoledronic acid, and stimulating factors such as epoetin, darbeopetin, filgrastim, PEG-filgrastim, and sargramostim;
   [3518] (xxxii) Axl inhibitors such as 1-(6,7-dihydro-5H-benzo[6,7]cyclohepta[1,2-c]pyridazin-3-yl)-N3-((7-(S)-pyrrolidin-1-yl)-6,7,8,9-tetrahydro-5H-benzo[7]annulene-2-yl)-1H-1,2,4-triazole-3,5-diamine; and/or
   [3519] (xxxiii) further combination chemotherapeutic regimens, such as combinations of carboplatin/paclitaxel, capecitabine/docetaxel, fluorauracil/levamisole, fluorauracil/leucovorin, methotrexate/leucovorin, and trastuzumab/paclitaxel, alone or in further combination with carboplatin.
[3520] 131. A method according to statement 129, wherein the further cancer treatment is:
   [3521] (i) a PD-1 inhibitor or PD-L1 inhibitor;
   [3522] (ii) a monoclonal antibody such as pembrolizumab, alemtuzumab, bevacizumab, cetuximab, ibritumomab, tiuxetan, or rituximab;
   [3523] (iii) a microtubule polymer stabilizer such as the taxanes paclitaxel and docetaxel; and/or
   [3524] (iv) a tyrosine kinase inhibitor such as erlotinib hydrochloride, gefitinib, imatinib mesylate, and semaxanib.
[3525] 132. A method according to statement 131, wherein the further cancer treatment is pembrolizumab.
[3526] 133. A method according to statement 131, wherein the further cancer treatment is docetaxel.
[3527] 134. A method according to statement 131, wherein the further cancer treatment is erlotinib.
[3528] 135. A method according to any one of statements 101-134, wherein the subject is mammalian, optionally wherein the subject is human.
[3529] 136. A method according to any one of statements 101-135, wherein the predictive method is performed before the subject receives a treatment or course of treatment for NSCLC.
[3530] 137. A method according to any one of statement 101-136, wherein the predictive method is performed during or after a treatment or course of treatment for NSCLC.
[3531] 138. A method according to any one of statements 101-135 or 137, wherein the subject has previously been treated with an agent capable of inhibiting or reversing EMT or a chemotherapeutic agent.
[3532] 139. A method according to statement 138, wherein the subject has previously been treated with an agent selected from: a PHGDH inhibitor, a Slfn11 inhibitor, an Axl inhibitor, or an Akt3 inhibitor.
[3533] 140. A method according to any one of statements 138-139, wherein the subject has previously been treated with an agent that is different to the agent capable of inhibiting or reversing EMT or chemotherapeutic agent for which the subject's susceptibility is being predicted.
[3534] 141. A method according to any one of statements 101-136, wherein the subject has not previously been treated with an agent capable of inhibiting or reversing EMT or a chemotherapeutic agent.
[3535] 142. A method according to statement 141, wherein the subject has not previously been treated with an Axl inhibitor.
[3536] 143. A method according to statement 141, wherein the subject has not previously been treated with an Akt3 inhibitor.
[3537] 144. A method according to any one of statements 101-143, wherein the sample is selected from: blood, serum, plasma, tissue biopsy, culture supernatant, or urine.
[3538] 145. A method according to statement 144, wherein the sample is a blood, serum, or plasma sample.
[3539] 146. A method according to statement 145, wherein the sample is a serum sample.
[3540] 147. A method according to any one of statements 104-146, wherein the method further comprises a subsequent step of assessing the activity, expression, or amount of one or more biomarker in the subject, in which a sample profile is obtained after contacting the subject with an agent capable of inhibiting or reversing EMT or a chemotherapeutic agent.
[3541] 148. A method according to statement 103, wherein the sample profile is obtained after contacting the subject with an agent capable of inhibiting or reversing EMT or a chemotherapeutic agent.
[3542] 149. A method according to statement 147 or 148, wherein the control profile is obtained from the same subject prior to contacting said subject with the agent capable of inhibiting or reversing EMT or a chemotherapeutic agent.
[3543] 150. A method according to statement 149, wherein an increase in the activity, expression, or amount of one or more biomarker in the sample profile as compared with the control profile is indicative of higher susceptibility to treatment with an agent capable of inhibiting or reversing EMT or a chemotherapeutic agent.
[3544] 151. A method according to statement 149, wherein a decrease in the activity, expression, or amount of one or more biomarker in the sample profile as compared with the control profile is indicative of higher susceptibility to treatment with an agent capable of inhibiting or reversing EMT or a chemotherapeutic agent.
[3545] 152. A method according to statement 149, wherein an increase in the activity, expression, or amount of one or more biomarker in the sample profile as compared with the control profile is indicative of lower susceptibility to treatment with an agent capable of inhibiting or reversing EMT or a chemotherapeutic agent.
[3546] 153. A method according to statement 149, wherein a decrease in the activity, expression, or amount of one or more biomarker in the sample profile as compared with the control profile is indicative of lower susceptibility to treatment with an agent capable of inhibiting or reversing EMT or a chemotherapeutic agent.
[3547] 154. A method according to statement 150, wherein the one or more biomarker includes at least Axl.
[3548] 155. A method according to any one of statements 147-154, wherein assessing the activity, expression, or amount of one or more biomarker in the subject, or in a sample derived from the subject, comprises:
   [3549] contacting a sample, or an extract from the sample, with at least 1, 2, 3, 4, 5, 6, 7, 8, 9, 10 or more reagents for detecting the activity, expression, or amount of one or more biomarkers, each of which is selective for a particular biomarker; and
   [3550] detecting and/or quantifying said reagents for detecting.
[3551] 156. A method according to statement 155, wherein assessing the expression or amount of one or more biomarker in the subject, or in a sample derived from the subject, comprises:
   [3552] contacting a sample, or an extract from the sample, with at least 1, 2, 3, 4, 5, 6, 7, 8, 9, 10 or more specific binding members, each of which selectively binds to a respective biomarker protein or mRNA; and
   [3553] detecting and/or quantifying formation of a complex formed by said specific binding member and said biomarker protein or mRNA.
[3554] 157. A method according to statement 156, wherein the specific binding member comprises an antibody molecule or binding fragment thereof.
[3555] 158. A method according to statement 156 or 157, wherein detecting formation of a complex formed by the specific binding member and the biomarker protein or mRNA is carried out by use of a technique selected from: Western blot; enzyme-linked immunosorbent assay (ELISA); radioimmunoassay (RIA); competitive enzyme immunoassay; double antibody sandwich ELISA (DAS-ELISA); liquid immunoarray technology; immunocytochemistry; immunohistochemistry; antibody microarray detection; precipitation of colloidal gold; affinity chromatography; ligand binding assay; and lectin binding assay.
[3556] 159. A method according to any one of statements 156-158 wherein the expression or amount of the one or more biomarker is determined as the absolute amount of the respective biomarker protein or mRNA in the sample.
[3557] 160. A method according to any one of statements 156-158 wherein the expression or amount of the one or more biomarker is determined as a relative amount of the respective biomarker protein or mRNA in the sample,
   [3558] optionally wherein the relative amount is determined relative to a reference protein or mRNA in the sample, the expression of which is not altered by NSCLC.
[3559] 161. A method according to any one of statements 148-160, wherein the agent capable of inhibiting or reversing EMT or chemotherapeutic agent is an Axl inhibitor, Akt3 inhibitor, Slfn11 inhibitor, or PHGDH inhibitor.
[3560] 162. A method according to statement 161, wherein the agent capable of inhibiting or reversing EMT or chemotherapeutic agent is an Axl inhibitor.
[3561] 163. A method according to statement 162, wherein the Axl inhibitor is BGB324/R428/bemcentinib, cabozantinib, TP-0903, foretinib, merestinib, bosutinib, gilteritinib, crizotinib, amuvatinib, sunitinib, sitravatinib, LDC1267, UNC2025, or an anti-Axl antibody described in WO2015/193428, WO2015/193430, WO2016/097370, or WO2016/166296.
[3562] 164. A method according to statement 163, wherein the Axl inhibitor is BGB324/R428/bemcentinib.
[3563] 165. A method according to statement 163, wherein the Axl inhibitor is an anti-Axl antibody described in WO2015/193428, WO2015/193430, WO2016/097370, or WO2016/166296.
[3564] 166. A method according to statement 161, wherein the agent capable of inhibiting or reversing EMT or chemotherapeutic agent is an Akt3 inhibitor.
[3565] 167. A method according to statement 166, wherein the Akt3 inhibitor is an Akt3 inhibitor disclosed in WO2016/102672.
[3566] 168. A method according to any one of statements 161-167, wherein the agent capable of inhibiting or reversing EMT is administered as a single agent.
[3567] 169. A method according to any one of statements 161-167, wherein the agent capable of inhibiting or reversing EMT is administered in combination with a further cancer treatment.
[3568] 170. A method according to statement 169, wherein the further cancer treatment is selected from the further cancer treatments listed in statement 130.
[3569] 171. A method according to statement 169, wherein the further cancer treatment is:
   [3570] (i) a PD-1 inhibitor or PD-L1 inhibitor;
   [3571] (ii) a monoclonal antibody such as pembrolizumab, alemtuzumab, bevacizumab, cetuximab, ibritumomab, tiuxetan, or rituximab;
   [3572] (iii) a microtubule polymer stabilizer such as the taxanes paclitaxel and docetaxel; and/or
   [3573] (iv) a tyrosine kinase inhibitor such as erlotinib hydrochloride, gefitinib, imatinib mesylate, and semaxanib.
[3574] 172. A method according to statement 171, wherein the further cancer treatment is pembrolizumab.
[3575] 173. A method according to statement 171, wherein the further cancer treatment is docetaxel.
[3576] 174. A method according to statement 171, wherein the further cancer treatment is erlotinib.
[3577] 175. A method according to any one of statements 148-174, wherein the subject is mammalian, optionally wherein the subject is human.
[3578] 176. A method according to any one of statements 148-175, wherein the subject was selected for treatment with the agent capable of inhibiting or reversing EMT or a chemotherapeutic agent, using a predictive method according to any one of statements 101-147.
[3579] 177. A method according to any one of statements 148-176, wherein the sample is selected from: blood, serum, plasma, tissue biopsy, culture supernatant, or urine.
[3580] 178. A method according to statement 177, wherein the sample is a blood, serum, or plasma sample.
[3581] 179. A method according to statement 178, wherein the sample is a serum sample.
[3582] 180. A method according to any one of statements 1-179, wherein the method is performed in vitro or ex vivo.
[3583] 201. A method of selecting subjects having, suspected of having, or diagnosed with non-small cell lung cancer (NSCLC) for treatment with an agent capable of inhibiting or reversing EMT or a chemotherapeutic agent, the method comprising:
   [3584] identifying subjects susceptible to treatment with an agent capable of inhibiting or reversing EMT or a chemotherapeutic agent using a method according to any one of statements 101-180; and
   [3585] selecting thus identified subjects for treatment.
[3586] 202. A method of selecting subjects having, suspected of having, or diagnosed with non-small cell lung cancer (NSCLC) for continued treatment with an agent capable of inhibiting or reversing EMT or a chemotherapeutic agent, the method comprising:
   [3587] identifying subjects susceptible to treatment with an agent capable of inhibiting or reversing EMT or a chemotherapeutic agent using a method according to any one of statements 148-180; and
   [3588] selecting thus identified subjects for treatment.
[3589] 203. A method according to any one of statements 201-202, wherein treatment comprises administering to the subject a therapeutically effective amount of an agent capable of inhibiting or reversing EMT or a chemotherapeutic agent.
[3590] 204. A method according to statement 203, wherein the treatment comprises an Axl inhibitor, Akt3 inhibitor, Slfn11 inhibitor, or PHGDH inhibitor.
[3591] 205. A method according to statement 204, wherein the treatment comprises an Axl inhibitor.
[3592] 206. A method according to statement 205, wherein the Axl inhibitor is BGB324/R428/bemcentinib, cabozantinib, TP-0903, foretinib, merestinib, bosutinib, gilteritinib, crizotinib, amuvatinib, sunitinib, sitravatinib, LDC1267, UNC2025, or an anti-Axl antibody described in WO2015/193428, WO2015/193430, WO2016/097370, or WO2016/166296.
[3593] 207. A method according to statement 206, wherein the Axl inhibitor is BGB324/R428/bemcentinib.
[3594] 208. A method according to statement 206, wherein the Axl inhibitor is an anti-Axl antibody described in WO2015/193428, WO2015/193430, WO2016/097370, or WO2016/166296.
[3595] 209. A method according to statement 204, wherein the treatment comprises an Akt3 inhibitor.
[3596] 210. A method according to statement 209, wherein the Akt3 inhibitor is an Akt3 inhibitor disclosed in WO2016/102672.
[3597] 211. A method according to any one of statements 203-210, wherein the treatment is administered as a single agent.
[3598] 212. A method according to any one of statements 203-211, wherein the treatment is administered in combination with a further cancer treatment.
[3599] 213. A method according to statement 212, wherein the further cancer treatment is selected from the further cancer treatments listed in statement 130.
[3600] 214. A method according to statement 212, wherein the further cancer treatment is:
   [3601] (i) a PD-1 inhibitor or PD-L1 inhibitor;
   [3602] (ii) a monoclonal antibody such as pembrolizumab, alemtuzumab, bevacizumab, cetuximab, ibritumomab, tiuxetan, or rituximab;
   [3603] (iii) a microtubule polymer stabilizer such as the taxanes paclitaxel and docetaxel; and/or
   [3604] (iv) a tyrosine kinase inhibitor such as erlotinib hydrochloride, gefitinib, imatinib mesylate, and semaxanib.
[3605] 215. A method according to statement 214, wherein the further cancer treatment is pembrolizumab.
[3606] 216. A method according to statement 214, wherein the further cancer treatment is docetaxel.
[3607] 217. A method according to statement 214, wherein the further cancer treatment is erlotinib.
[3608] 301. A diagnostic kit comprising 1, 2, 3, 4, 5, 6, 7, 8, 9, 10 or more reagents for detecting the activity, expression, or amount of one or more biomarkers, each of which is selective for a particular biomarker selected from the group consisting of: Axl, AB-40, Aggrecan, FRTN, RAGE, Nr-CAM, Sclerostin, PSA-f, EGFR, NF-H, DBH, Fib-1C, Myoglobin, uPA, Vaspin, IL-23, A2Macro, TIMP-2, TSH, MPIF-1, PPP, IL-7, PARC, CA-15-3, PGI, Apo E, Apo C-I, MSP, CCL15, Progranulin, CEACAM1, VDBP, CA-9, and/or LDH.
[3609] 302. A test device comprising 1, 2, 3, 4, 5, 6, 7, 8, 9, 10 or more reagents for detecting the activity, expression, or amount of one or more biomarkers, each of which is selective for a particular biomarker selected from the group consisting of: Axl, AB-40, Aggrecan, FRTN, RAGE, Nr-CAM, Sclerostin, PSA-f, EGFR, NF-H, DBH, Fib-1C, Myoglobin, uPA, Vaspin, IL-23, A2Macro, TIMP-2, TSH, MPIF-1, PPP, IL-7, PARC, CA-15-3, PGI, Apo E, Apo C-I, MSP, CCL15, Progranulin, CEACAM1, VDBP, CA-9, and/or LDH.
[3610] 303. A diagnostic kit or test device according to any one of statements 301 or 302, comprising:
   [3611] 1, 2, 3, 4, 5, 6, 7, 8, 9, 10 or more specific binding members, each of which selectively binds to a biomarker selected from the group consisting of: Axl, AB-40, Aggrecan, FRTN, RAGE, Nr-CAM, Sclerostin, PSA-f, EGFR, NF-H, DBH, Fib-1C, Myoglobin, uPA, Vaspin, IL-23, A2Macro, TIMP-2, TSH, MPIF-1, PPP, IL-7, PARC, CA-15-3, PGI, Apo E, Apo C-I, MSP, CCL15, Progranulin, CEACAM1, VDBP, CA-9, and/or LDH; and
   [3612] one or more reagents for detecting said one or more specific binding members or one or more reagents for detecting and/or quantifying formation of a complex formed by said specific binding member and said biomarker.
[3613] 304. A diagnostic kit or test device according to any one of statements 301-303, wherein each reagent for detecting or specific binding member is selective for a biomarker selected from the group:
   [3614] (i) Axl, AB-40, Aggrecan, FRTN, RAGE, Nr-CAM, Sclerostin, PSA-f, EGFR, NF-H, DBH, Fib-1C, Myoglobin, uPA, Vaspin, IL-23, A2Macro, TIMP-2, and/or LDH;
   [3615] (ii) Axl, TSH, MPIF-1, PPP, Vaspin, IL-7, PARC, CA-15-3, and/or LDH; or
   [3616] (iii) Axl, PGI, Apo E, Apo C-I, MSP, CCL15, Progranulin, CEACAM1, VDBP, CA-9, and/or LDH.
[3617] 305. A diagnostic kit or test device according to statement 303 or 304, wherein the specific binding member comprises an antibody molecule or binding fragment thereof.
[3618] 306. A diagnostic kit or test device according to any of statements 303-305, wherein detecting formation of a complex formed by the specific binding member and the biomarker is carried out by use of a technique selected from: Western blot; enzyme-linked immunosorbent assay (ELISA); radioimmunoassay (RIA); competitive enzyme immunoassay; double antibody sandwich ELISA (DAS-ELISA); liquid immunoarray technology; immunocytochemistry; immunohistochemistry; antibody microarray detection; precipitation of colloidal gold; affinity chromatography; ligand binding assay; and lectin binding assay.
[3619] 307. A diagnostic kit or test device according to any one of statements 301-306, wherein the kit or test device comprises no more than 15, 20, 25, 30, 40, or 50 reagents for detecting.
[3620] 308. A diagnostic kit or test device according to any one of statements 301-307 for use in a method of predicting a cancer-related outcome in a subject.
[3621] 309. A diagnostic kit for use, or test device for use, according to statement 308, wherein the cancer-related outcome is susceptibility to treatment with an agent capable of inhibiting or reversing EMT or a chemotherapeutic agent.
[3622] 310. A diagnostic kit for use, or test device for use, according to statement 309, wherein the agent capable of inhibiting or reversing EMT or chemotherapeutic agent is an Axl inhibitor, Akt3 inhibitor, Slfn11 inhibitor, or PHGDH inhibitor.
[3623] 311. A diagnostic kit for use, or test device for use, according to statement 309, wherein the agent capable of inhibiting or reversing EMT or chemotherapeutic agent is an Axl inhibitor.
[3624] 312. A diagnostic kit for use, or test device for use, according to statement 311, wherein the Axl inhibitor is BGB324/R428/bemcentinib, cabozantinib, TP-0903, foretinib, merestinib, bosutinib, gilteritinib, crizotinib, amuvatinib, sunitinib, sitravatinib, LDC1267, UNC2025, or an anti-Axl antibody described in WO2015/193428, WO2015/193430, WO2016/097370, or WO2016/166296.
[3625] 313. A diagnostic kit for use, or test device for use, according to statement 312, wherein the Axl inhibitor is BGB324/R428/bemcentinib.
[3626] 314. A diagnostic kit for use, or test device for use, according to statement 312, wherein the Axl inhibitor is an anti-Axl antibody described in WO2015/193428, WO2015/193430, WO2016/097370, or WO2016/166296.
[3627] 315. A diagnostic kit for use, or test device for use, according to statement 309, wherein the agent capable of inhibiting or reversing EMT or chemotherapeutic agent is an Akt3 inhibitor.
[3628] 316. A diagnostic kit for use, or test device for use, according to any one of statements 308-311, wherein the subject has, is suspected of having, or has been diagnosed with non-small cell lung cancer (NSCLC).
[3629] 317. A diagnostic kit for use, or test device for use, according to any one of statements 308-316, wherein the method is a method according to any one of statements 101-180.
[3630] 318. Use of a reagent for detecting the activity, expression, or amount of a biomarker selected from the group consisting of: Axl, AB-40, Aggrecan, FRTN, RAGE, Nr-CAM, Sclerostin, PSA-f, EGFR, NF-H, DBH, Fib-1C, Myoglobin, uPA, Vaspin, IL-23, A2Macro, TIMP-2, TSH, MPIF-1, PPP, IL-7, PARC, CA-15-3, PGI, Apo E, Apo C-I, MSP, CCL15, Progranulin, CEACAM1, VDBP, CA-9, and/or LDH, in a method of predicting a cancer-related outcome in a subject.
[3631] 319. Use of 1, 2, 3, 4, 5, 6, 7, 8, 9, 10 or more reagents for detecting the activity, expression, or amount a biomarker, each of which is selective for a particular biomarker selected from the group consisting of: Axl, AB-40, Aggrecan, FRTN, RAGE, Nr-CAM, Sclerostin, PSA-f, EGFR, NF-H, DBH, Fib-1C, Myoglobin, uPA, Vaspin, IL-23, A2Macro, TIMP-2, TSH, MPIF-1, PPP, IL-7, PARC, CA-15-3, PGI, Apo E, Apo C-I, MSP, CCL15, Progranulin, CEACAM1, VDBP, CA-9, and/or LDH, in a method of manufacture of a diagnostic kit or test device for use in a method of predicting a cancer-related outcome in a subject.
[3632] 320. A use according to any one of statements 318 or 319, wherein each reagent for detecting is selective for a biomarker selected from the group:
   [3633] (i) Axl, AB-40, Aggrecan, FRTN, RAGE, Nr-CAM, Sclerostin, PSA-f, EGFR, NF-H, DBH, Fib-1C, Myoglobin, uPA, Vaspin, IL-23, A2Macro, TIMP-2, and/or LDH;
   [3634] (ii) Axl, TSH, MPIF-1, PPP, Vaspin, IL-7, PARC, CA-15-3, and/or LDH; or
   [3635] (iii) Axl, PGI, Apo E, Apo C-I, MSP, CCL15, Progranulin, CEACAM1, VDBP, CA-9, and/or LDH.
[3636] 321. A use according to any one of statements 318-320, wherein the reagent for detecting comprises a specific binding member selective for a particular biomarker.
[3637] 322. A use according to any one of statement 318-321, wherein the method of predicting a cancer-related outcome in a subject is a method according to any one of statements 101-180.
[3638] 401. Use of one or more of: Axl, AB-40, Aggrecan, FRTN, RAGE, Nr-CAM, Sclerostin, PSA-f, EGFR, NF-H, DBH, Fib-1C, Myoglobin, uPA, Vaspin, IL-23, A2Macro, TIMP-2, TSH, MPIF-1, PPP, IL-7, PARC, CA-15-3, PGI, Apo E, Apo C-I, MSP, CCL15, Progranulin, CEACAM1, VDBP, CA-9, and/or LDH, as a biomarker for determining if a subject is susceptible to treatment with an agent capable of inhibiting or reversing EMT or a chemotherapeutic agent.
[3639] 402. A use according to statement 401, wherein:
   [3640] (i) a higher activity, expression, or amount of one or more of said biomarkers in the subject, or sample derived from the subject, compared with a control profile for the respective biomarker is indicative of susceptibility to treatment with an agent capable of inhibiting or reversing EMT or a chemotherapeutic agent; or
   [3641] (ii) a lower activity, expression, or amount of one or more of said biomarkers in the subject, or sample derived from the subject, compared with a control profile for the respective biomarker is indicative of susceptibility to treatment with an agent capable of inhibiting or reversing EMT or a chemotherapeutic agent.
[3642] 403. A use according to statement 401, wherein:
   [3643] (i) an increase in the activity, expression, or amount of one or more biomarker relative to a control profile for the respective biomarker after contacting the subject with a cancer therapeutic agent is indicative of increased susceptibility to treatment with an agent capable of inhibiting or reversing EMT or a chemotherapeutic agent; or
   [3644] (ii) a decrease in the activity, expression, or amount of one or more biomarker relative to a control profile for the respective biomarker after contacting the subject with a cancer therapeutic agent is indicative of increased susceptibility to treatment with an agent capable of inhibiting or reversing EMT or a chemotherapeutic agent.
[3645] 404. A use according to any one of statement 401-403, wherein the one or more biomarker is selected from the group consisting of:
   [3646] (i) Axl, AB-40, Aggrecan, FRTN, RAGE, Nr-CAM, Sclerostin, PSA-f, EGFR, NF-H, DBH, Fib-1C, Myoglobin, uPA, Vaspin, IL-23, A2Macro, TIMP-2, and/or LDH;
   [3647] (ii) Axl, TSH, MPIF-1, PPP, Vaspin, IL-7, PARC, CA-15-3, and/or LDH; or
   [3648] (iii) Axl, PGI, Apo E, Apo C-I, MSP, CCL15, Progranulin, CEACAM1, VDBP, CA-9, and/or LDH.
[3649] 405. A use according to any one of statements 401-404, wherein the use is as a biomarker in a method according to any one of statements 101-180
[3650] 501. A method of treating a subject having, suspected of having, or diagnosed with non-small cell lung cancer (NSCLC), the method comprising:
   [3651] identifying a subject susceptible to treatment using a method according to any one of statements 101-180; and
   [3652] administering to the subject a therapeutically effective amount of an agent capable of inhibiting or reversing EMT or a chemotherapeutic agent.
[3653] 502. A method of treating a subject having, suspected of having, or diagnosed with non-small cell lung cancer (NSCLC), the method comprising:
   [3654] (a) obtaining a sample from the subject;
   [3655] (b) determining if the subject is susceptible to treatment with an agent capable of inhibiting or reversing EMT or a chemotherapeutic agent using a method according to any one of statements 101-180;
   [3656] (c) administering to the subject a therapeutically effective amount of an agent capable of inhibiting or reversing EMT or a chemotherapeutic agent.
[3657] 503. A method of treating a subject having, suspected of having, or diagnosed with non-small cell lung cancer (NSCLC), the method comprising administering a therapeutically effective amount of an agent capable of inhibiting or reversing EMT or chemotherapeutic agent to a subject identified as susceptible to said treatment using a method according to any one of statements 101-180.
[3658] 504. A method of treating a subject having, suspected of having, or diagnosed with non-small cell lung cancer (NSCLC), the method comprising:
   [3659] administering to the subject a therapeutically effective amount of an agent capable of inhibiting or reversing EMT or a chemotherapeutic agent; and
   [3660] determining if the subject is susceptible to said treatment using a method according to any one of statements 148-180.
[3661] 505. A method according to statement 504, wherein the method comprises administering to the subject one or more further therapeutically effective amounts of an agent capable of inhibiting or reversing EMT or a chemotherapeutic agent provided that the subject is identified as susceptible to said treatment.
[3662] 506. An agent capable of inhibiting or reversing EMT or chemotherapeutic agent for use in a method of treating a subject having, suspected of having, or diagnosed with non-small cell lung cancer (NSCLC),
   [3663] wherein the method is a method according to any one of statements 501-505.
[3664] 507. Use of an agent capable of inhibiting or reversing EMT or chemotherapeutic agent for use in a method of manufacture of a medicament for use in a method of treating a subject having, suspected of having, or diagnosed with non-small cell lung cancer (NSCLC),
   [3665] wherein the method of treatment is a method according to any one of statements 501-505.
[3666] 508. A method, agent for use, or use according to any one of statements 501-507, wherein the agent capable of inhibiting or reversing EMT or chemotherapeutic agent comprises an Axl inhibitor, Akt3 inhibitor, Slfn11 inhibitor, or PHGDH inhibitor.
[3667] 509. A method, agent for use, or use according to statement 508, wherein the agent capable of inhibiting or reversing EMT or chemotherapeutic agent comprises an Axl inhibitor.
[3668] 510. A method, agent for use, or use according to statement 509, wherein the Axl inhibitor is BGB324/R428/bemcentinib, cabozantinib, TP-0903, foretinib, merestinib, bosutinib, gilteritinib, crizotinib, amuvatinib, sunitinib, sitravatinib, LDC1267, UNC2025, or an anti-Axl antibody described in WO2015/193428, WO2015/193430, WO2016/097370, or WO2016/166296.
[3669] 511. A method, agent for use, or use according to statement 510, wherein the Axl inhibitor is BGB324/R428/bemcentinib.
[3670] 512. A method, agent for use, or use according to statement 510, wherein the Axl inhibitor is an anti-Axl antibody described in WO2015/193428, WO2015/193430, WO2016/097370, or WO2016/166296.
[3671] 512. A method, agent for use, or use according to statement 508, wherein the agent capable of inhibiting or reversing EMT or chemotherapeutic agent comprises an Akt3 inhibitor.
[3672] 513. A method, agent for use, or use according to statement 512, wherein the Akt3 inhibitor is an Akt3 inhibitor disclosed in WO2016/102672.
[3673] 514. A method, agent for use, or use according to any one of statements 501-513, wherein the agent capable of inhibiting or reversing EMT or chemotherapeutic agent is administered as a single agent.
[3674] 515. A method, agent for use, or use according to any one of statements 501-513, wherein the agent capable of inhibiting or reversing EMT or chemotherapeutic agent is administered in combination with a further cancer treatment.
[3675] 516. A method, agent for use, or use according to statement 515, wherein the further cancer treatment is selected from the further cancer treatments listed in statement 130.
[3676] 517. A method, agent for use, or use according to statement 515, wherein the further cancer treatment is:
   [3677] (i) a PD-1 inhibitor or PD-L1 inhibitor;
   [3678] (ii) a monoclonal antibody such as pembrolizumab, alemtuzumab, bevacizumab, cetuximab, ibritumomab, tiuxetan, or rituximab;
   [3679] (iii) a microtubule polymer stabilizer such as the taxanes paclitaxel and docetaxel; and/or
   [3680] (iv) a tyrosine kinase inhibitor such as erlotinib hydrochloride, gefitinib, imatinib mesylate, and semaxanib.
[3681] 518. A method, agent for use, or use according to statement 517, wherein the further cancer treatment is pembrolizumab.
[3682] 519. A method, agent for use, or use according to statement 517, wherein the further cancer treatment is docetaxel.
[3683] 520. A method, agent for use, or use according to statement 517, wherein the further cancer treatment is erlotinib.

[3684] Facet 6a: Non-Small Cell Lung Cancer (NSCLC)

[3685] Non-small cell lung cancers (NSCLC) are any type of epithelial lung cancer other than small cell lung carcinoma (SCLC), and make up the majority of all lung cancers. Non-small cell lung carcinomas are grouped together because their prognosis and management are similar—the three main histologic classes are: squamous cell lung carcinoma, adenocarcinoma, and large cell lung carcinoma. Adenocarcinoma is the most common histologic type of lung carcinoma. Non-small cell lung cancers are often treated with cisplatin or carboplatin, in combination with gemcitabine, paclitaxel, docetaxel, etoposide or vinorelbine. There remains a need for targeted therapies for NSCLC (Herbst et al, 2018; Zappa et al, 2016).

[3686] Accordingly, robust biomarkers for predicting cancer-related outcomes in a subject having NSCLC, for example susceptibility to treatment with an agent capable of inhibiting or reversing EMT or a chemotherapeutic agent, would be useful in identifying subjects who are most likely to respond to or benefit from treatment with a particular agent/regimen.

[3687] A “responder” subject as described herein is a subject who is likely to, or who does, respond to treatment (or benefit from treatment) with an agent capable of inhibiting or reversing EMT or a chemotherapeutic agent, for example the small molecule Axl kinase inhibitor BGB324/R428/bemcentinib when administered either as a single agent or in combination with another cancer treatment.

[3688] Correspondingly, a “non-responder” subject as described herein is a subject who is not likely to, or who does not, respond to treatment (or benefit from treatment) with an agent capable of inhibiting or reversing EMT or a chemotherapeutic agent, for example the small molecule Axl kinase inhibitor BGB324/R428/bemcentinib when administered either as a single agent or in combination with another cancer treatment.

[3689] To “respond to treatment” or “benefit from treatment” as used herein means to experience an overall clinical benefit from the treatment. This overall clinical benefit can be any of: prolonged survival, partial or complete disease remission, slowing or absence of disease progression, tumour shrinkage (for example, a reduction in tumour volume of 5, 10, 20, 30, 40% or more), reduction in tumour burden (for example, a reduction in tumour burden of 5, 10, 20, 30, 40% or more), slowing or absence of tumour enlargement, slowing or absence of increase in tumour burden, improved quality of life, progression-free survival, overall survival, or any other positive patient outcome. Suitable methods for determining tumour volume are well known to the skilled person, for example, using: computed tomography (CT), or magnetic resonance imaging (MRI) imaging technologies; X-ray imaging, for example, mammography; ultrasound imaging; nuclear imaging, for example positron emission tomography (PET), PET/CT scans, bone scans, gallium scans, or metaiodobenzylguanidine (MIBG) scans; bioluminescence imaging (BLI); fluorescence imaging (FLI); BD ToF (infrared-based 3D Time-of-Flight camera) imaging.

[3690] Biomarkers

[3691] The term “marker” or “biomarker” is used herein to refer to a gene or protein whose expression in a subject or sample derived from a subject is altered or modulated, for example, up or down regulated, in cancer. Where the biomarker is a protein, modulation or alteration of expression encompasses modulation through different post-translational modifications.

[3692] In accordance with any aspect of this facet of the present disclosure the biomarkers described herein may be defined as follows, wherein:
[3693] an Axl biomarker comprises an amino acid sequence having at least 70%, 80%, 90%, 95%, 99% or 100% sequence identity with the full-length of the amino acid sequence disclosed at UniProt accession no: P30530-1 or P30530-2 (entry version 196) or a fragment thereof;
[3694] a N-terminal prohormone of brain natriuretic peptide (NT proBNP) biomarker comprises an amino acid sequence having at least 70%, 80%, 90%, 95%, 99% or 100% sequence identity with the full-length of the amino acid sequence disclosed at UniProt accession no: P16860-1 (entry version 186) or a fragment thereof;
[3695] a Endostatin biomarker comprises an amino acid sequence having at least 70%, 80%, 90%, 95%, 99% or 100% sequence identity with the full-length of the amino acid sequence disclosed at UniProt accession no: P39059-1 (entry version 170) or a fragment thereof;
[3696] a Insulin-like Growth Factor-Binding Protein 2 (IGFBP-2) biomarker comprises an amino acid sequence having at least 70%, 80%, 90%, 95%, 99% or 100% sequence identity with the full-length of the amino acid sequence disclosed at UniProt accession no: P18065-1 (entry version 193) or a fragment thereof;
[3697] a Vascular endothelial growth factor D (VEGF-D) biomarker comprises an amino acid sequence having at least 70%, 80%, 90%, 95%, 99% or 100% sequence identity with the full-length of the amino acid sequence disclosed at UniProt accession no: 043915-1 (entry version 159) or a fragment thereof;
[3698] a Growth/differentiation factor 15 (GDF-15) comprises an amino acid sequence having at least 70%, 80%, 90%, 95%, 99% or 100% sequence identity with the full-length of the amino acid sequence disclosed at UniProt accession no: Q99988-1 (entry version 166) or a fragment thereof;
[3699] a Beta Amyloid 1-40 (AB-40) biomarker comprises an amino acid sequence having at least 70%, 80%, 90%, 95%, 99% or 100% sequence identity with the full-length of the amino acid sequence disclosed at UniProt accession no: P05067-1, P05067-2, P05067-3, P05067-4, P05067-5, P05067-6, P05067-7, P05067-8, P05067-9, P05067-10, or P05067-11 (entry version 271) or a fragment thereof;
[3700] a Antileukoproteinase (ALP) biomarker comprises an amino acid sequence having at least 70%, 80%, 90%, 95%, 99% or 100% sequence identity with the full-length of the amino acid sequence disclosed at UniProt accession no: P03973 (entry version 184) or a fragment thereof;
[3701] a Monocyte Chemotactic Protein 3 (MCP-3) comprises an amino acid sequence having at least 70%, 80%, 90%, 95%, 99% or 100% sequence identity with the full-length of the amino acid sequence disclosed at UniProt accession no: P80098-1 (entry version 169) or a fragment thereof;
[3702] a Superoxide Dismutase 1, soluble (SOD-1) biomarker comprises an amino acid sequence having at least 70%, 80%, 90%, 95%, 99% or 100% sequence identity with the full-length of the amino acid sequence disclosed at UniProt accession no: P00441-1 (entry version 240) or a fragment thereof;
[3703] a Bone morphogenetic protein 9 (BMP-9) biomarker comprises an amino acid sequence having at least 70%, 80%, 90%, 95%, 99% or 100% sequence identity with the full-length of the amino acid sequence disclosed at UniProt accession no: Q9UK05-1 (entry version 162) or a fragment thereof;
[3704] a Interleukin-8 (IL-8) biomarker comprises an amino acid sequence having at least 70%, 80%, 90%, 95%, 99% or 100% sequence identity with the full-length of the amino acid sequence disclosed at UniProt accession no: P10145 (entry version 210) or a fragment thereof;
[3705] a Macrophage Inflammatory Protein-1 beta (MIP-1 beta) biomarker comprises an amino acid sequence having at least 70%, 80%, 90%, 95%, 99% or 100% sequence identity with the full-length of the amino acid sequence disclosed at UniProt accession no: P13236 (entry version 187) or a fragment thereof;
[3706] a Receptor for advanced glycosylation end products (RAGE) biomarker comprises an amino acid sequence having at least 70%, 80%, 90%, 95%, 99% or 100% sequence identity with the full-length of the amino acid sequence disclosed at UniProt accession no: Q15109-1, Q15109-2, Q15109-3, Q15109-4, Q15109-5, Q15109-6, Q15109-7, Q15109-8, Q15109-9, Q15109-10 (entry version 189) or a fragment thereof;
[3707] a Myeloperoxidase (MPO) biomarker comprises an amino acid sequence having at least 70%, 80%, 90%, 95%, 99% or 100% sequence identity with the full-length of the amino acid sequence disclosed at UniProt accession no: P05164-1, P05164-2, or P05164-3 (entry version 217) or a fragment thereof;
[3708] a Chromogranin-A (CgA) biomarker comprises an amino acid sequence having at least 70%, 80%, 90%, 95%, 99% or 100% sequence identity with the full-length of the amino acid sequence disclosed at UniProt accession no: P10645-1 (entry version 200) or a fragment thereof;
[3709] a HE4 biomarker comprises an amino acid sequence having at least 70%, 80%, 90%, 95%, 99% or 100% sequence identity with the full-length of the amino acid sequence disclosed at UniProt accession no: Q14508-1, Q14508-2, Q14508-3, Q14508-4, or Q14508-5 (entry version 169) or a fragment thereof;
[3710] a Adrenomedullin (ADM) biomarker comprises an amino acid sequence having at least 70%, 80%, 90%, 95%, 99% or 100% sequence identity with the full-length of the amino acid sequence disclosed at UniProt accession no: P35318-1 (entry version 174) or a fragment thereof;
[3711] a Beta-2-Microglobulin (B2M) biomarker comprises an amino acid sequence having at least 70%, 80%, 90%, 95%, 99% or 100% sequence identity with the full-length of the amino acid sequence disclosed at UniProt accession no: P61769-1 (entry version 181) or a fragment thereof;
[3712] a Vitamin D-Binding Protein (VDBP) biomarker comprises an amino acid sequence having at least 70%, 80%, 90%, 95%, 99% or 100% sequence identity with the full-length of the amino acid sequence disclosed at UniProt accession no: P02774-1, P02774-2, or P02774-3 (entry version 201) or a fragment thereof;
[3713] a Cystatin-C biomarker comprises an amino acid sequence having at least 70%, 80%, 90%, 95%, 99% or 100% sequence identity with the full-length of the amino acid sequence disclosed at UniProt accession no: P01034-1 (entry version 213) or a fragment thereof;
[3714] a Hepsin biomarker comprises an amino acid sequence having at least 70%, 80%, 90%, 95%, 99% or 100% sequence identity with the full-length of the amino acid sequence disclosed at UniProt accession no: P05981-1 (entry version 183) or a fragment thereof;
[3715] a Lactate Dehydrogenase (LDH) biomarker comprises an amino acid sequence having at least 70%, 80%, 90%, 95%, 99% or 100% sequence identity with the full-length of the amino acid sequence disclosed at UniProt accession no: P00338-1, P00338-2, P00338-3, P00338-4, or P00338-5 (entry version 224) or a fragment thereof; and/or
[3716] a Lactate Dehydrogenase (LDH) biomarker comprises an amino acid sequence having at least 70%, 80%, 90%, 95%, 99% or 100% sequence identity with the full-length of the amino acid sequence disclosed at UniProt accession no: P07195-1 (entry version 218) or a fragment thereof.

[3717] The biomarkers described herein may also be defined as a nucleic acid (either DNA or RNA) having at least 70%, 80%, 90%, 95%, 99% or 100% sequence identity with the full-length nucleic acid sequence encoding any of the above amino acid sequences.

[3718] Identity may be as defined using sequence comparisons made using FASTA and FASTP (see Pearson & Lipman, 1988. Methods in Enzymology 183: 63-98). Parameters are preferably set, using the default matrix, as follows: Gapopen (penalty for the first residue in a gap): −12 for proteins/-16 for DNA; Gapext (penalty for additional residues in a gap): −2 for proteins/-4 for DNA; KTUP word length: 2 for proteins/6 for DNA.

[3719] Pre-Treatment Predictive Biomarkers and Methods

[3720] By analysing further patient data obtained from clinical trial BGBC008 (NCT03184571) the authors have discovered that, prior to treatment of subjects having NSCLC, certain of the biomarkers described herein are present in the serum of “responder” subjects at higher levels than in the serum of “non-responder” subjects—see Examples 4, 5, 6, and 7. Similarly, prior to treatment of the subject certain of the biomarkers described herein are present in the serum of “responder” subjects at lower levels than in the serum of “non-responder” subjects. Thus, by assessing the activity, expression, or amount of one or more of the biomarkers described herein prior to treatment with an agent capable of inhibiting or reversing EMT or a chemotherapeutic agent it is possible to determine the likelihood of that subject being susceptible or responsive to treatment with said agent.

[3721] Accordingly, in a first aspect of this facet, the disclosure provides a method of predicting a cancer-related outcome in a subject having, suspected of having, or diagnosed with non-small cell lung cancer (NSCLC), the method comprising assessing the activity, expression, or amount of one or more of the biomarkers described herein in the subject, or in a sample derived from the subject.

[3722] In some embodiments the one or more biomarker is selected from the group consisting of: NT proBNP, Endostatin, IGFBP-2, VEGF-D, GDF-15, AB-40, ALP, MCP-3, SOD-1, BMP-9, IL-8, MIP-1 beta, RAGE, MPO, CgA, HE4, ADM, B2M, VDBP, Cystatin-C, Hepsin, LDH, and/or Axl.

[3723] In some embodiments the one or more biomarker is selected from the group consisting of: NT proBNP, Endostatin, IGFBP-2, VEGF-D, LDH, and/or Axl.

[3724] In some embodiments the one or more biomarker is selected from the group consisting of: NT proBNP, Endostatin, IGFBP-2, and/or VEGF-D.

[3725] In some embodiments the one or more biomarker is selected from the group consisting of: AB-40, RAGE, VDBP, LDH, and/or Axl.

[3726] In some embodiments the one or more biomarker is selected from the group consisting of: AB-40, RAGE, and/or VDBP.

[3727] A “cancer-related outcome” as described herein is a clinical prediction or prognosis associated with cancer. In some embodiments the cancer-related outcome is susceptibility to treatment with an agent capable of inhibiting or reversing EMT or a chemotherapeutic agent.

[3728] In some embodiments the method comprises assessing the activity, expression, or amount of one or more of the biomarkers described herein in the subject, or in a sample derived from the subject, to obtain a sample profile of the one or more biomarker; and, making a prediction based on the sample profile of the one or more biomarker.

[3729] A “sample profile” as used herein is a profile of numerical values or numerical ranges corresponding to the activity, expression, or amount of respective biomarkers determined in the subject or sample derived from the subject.

[3730] In some embodiments of the method the prediction is made by comparing the sample profile to a control profile. A “control profile” as used herein is a profile of numerical values or numerical ranges corresponding to the activity, expression, or amount of the same biomarkers as for the sample profile, determined in a control subject or population of control subjects. Suitable control profiles are described in more detail below.

[3731] Prior to treatment of a subject, certain of the biomarkers described herein have been found to exhibit up-regulated expression in “responder” subjects—that is, certain of the biomarkers described herein have been found to be present in the serum of “responder” subjects at higher levels than in the serum of “non-responder” subjects. Similarly, prior to treatment of a subject, certain of the biomarkers described herein have been found to exhibit down-regulated expression in “responder” subjects—that is, certain of the biomarkers described herein have been found to be present in the serum of “responder” subjects at lower levels than in the serum of “non-responder” subjects.

[3732] This difference in expression level between “responder” and “non-responder” subjects can also be expressed in the opposite way. That is to say, prior to treatment of a subject, certain of the biomarkers described herein have been found to exhibit down-regulated expression in “non-responder” subjects—that is, certain of the biomarkers described herein have been found to be present in the serum of “non-responder” subjects at lower levels than in the serum of “responder” subjects. Similarly, prior to treatment of a subject, certain of the biomarkers described herein have been found to exhibit up-regulated expression in “non-responder” subjects—that is, certain of the biomarkers described herein have been found to be present in the serum of “non-responder” subjects at higher levels than in the serum of “responder” subjects.

[3733] The discovery of these differential patterns of expression mean that, by assessing the activity, expression, or amount of one or more of the biomarkers described herein prior to treatment of a subject with an agent, it is possible to determine the likelihood of that subject being susceptible or responsive to treatment with said agent. Accordingly, in particularly preferred embodiments the sample profile is obtained before the subject is contacted with or administered the agent capable of inhibiting or reversing EMT or a chemotherapeutic agent.

[3734] A subject who is “susceptible to treatment” with an agent capable of inhibiting or reversing EMT or a chemotherapeutic agent is one who is likely to, or who does, respond to treatment (or benefit from treatment) with an agent capable of inhibiting or reversing EMT or a chemotherapeutic agent. That is, a subject who is “susceptible to treatment” with an agent is a “responder” subject for that agent, as defined above. A prediction that is “indicative of susceptibility” is one which suggests or points towards the likelihood that a subject will respond to or benefit from treatment.

[3735] In some embodiments the predictive methods of the disclosure comprise assessing the activity, expression, or amount of one or more of the biomarkers described herein in the subject, or in a sample derived from the subject, to obtain a sample profile of the one or more biomarker; and, making a prediction based on the sample profile of the one or more biomarker. In some embodiments of the method the prediction is made by comparing the sample profile to a control profile, wherein the control profile is a profile of numerical values or numerical ranges corresponding to the activity, expression, or amount of the same biomarkers as for the sample profile, determined in a control subject or population of control subjects.

[3736] In some embodiments the control profile may be obtained from a population of control subjects having NSCLC. In some embodiments the control profile may be obtained from a population of control subjects not having NSCLC. In other embodiments the control profile may be obtained from a control subject or population of control subjects having NSCLC and previously found to lack susceptibility to treatment with an agent capable of inhibiting or reversing EMT or a chemotherapeutic agent (that is, non-responder subjects).

[3737] In some embodiments the control profile may a predetermined profile of biomarker expression, activity, or amount values, for example a profile of “mean” values, “threshold” values, or “standard ranges” of values. This predetermined profile of biomarker expression, activity, or amount values can be obtained, for example, from a control subject or population of control subjects having NSCLC, a control subject or population of control subjects not having NSCLC, or a control subject or population of control subjects having NSCLC and previously found to lack susceptibility to treatment with an agent capable of inhibiting or reversing EMT or a chemotherapeutic agent (that is, non-responder subjects).

[3738] In some other embodiments the control profile may be obtained from a control subject or population of control subjects having NSCLC and previously found to be susceptible to treatment with an agent capable of inhibiting or reversing EMT or a chemotherapeutic agent (that is, responder subjects). In some embodiments the control profile may a predetermined profile of biomarker expression, activity, or amount values, for example a profile of “threshold”, values or “standard ranges” of values. This predetermined profile of biomarker expression, activity, or amount values can be obtained, for example, from a control subject or population of control subjects having NSCLC and previously found to be susceptible to treatment with an agent capable of inhibiting or reversing EMT or a chemotherapeutic agent (that is, responder subjects).

[3739] In some other embodiments the control profile may be obtained from a control sample having a known amount (for example a “threshold” amount) of the same biomarkers as will be determined in the sample profile. This threshold amount can be obtained, for example, from non-responder or responder subjects as outlined above.

[3740] The skilled person is readily able to determine suitable “mean”, “threshold”, or “standard range” values for a particular biomarker.

[3741] For example, a “mean” value may be determined by: assessing the activity, expression, or amount of a particular biomarker in a population of subjects having (or not having) NSCLC; and, averaging the biomarker activity, expression, or amount determined to determine a “mean” value.

[3742] For example, a “mean” value may be determined by: assessing the activity, expression, or amount of a particular biomarker in a population of subjects; determining which subjects in the population are susceptible to treatment with an agent capable of inhibiting or reversing EMT or a chemotherapeutic agent; and, averaging the biomarker activity, expression, or amount determined in subjects found to be susceptible to treatment with an agent capable of inhibiting or reversing EMT or a chemotherapeutic agent (that is, responder subjects) to determine a “mean” value.

[3743] For example, a “threshold” value may be determined by: assessing the activity, expression, or amount of a particular biomarker in a population of subjects; determining which subjects in the population are susceptible to treatment with an agent capable of inhibiting or reversing EMT or a chemotherapeutic agent; and, selecting as appropriate the highest or lowest biomarker activity, expression, or amount determined in a subject found to be susceptible to treatment with an agent capable of inhibiting or reversing EMT or a chemotherapeutic agent (that is, a responder subject) as the “threshold value”.

[3744] For example, a “standard range” of values may be determined by: assessing the activity, expression, or amount of a particular biomarker in a population of subjects having (or not having) NSCLC; and, determining a “standard range” of values based on this assessment.

[3745] For example, a “standard range” of values may be determined by: assessing the activity, expression, or amount of a particular biomarker in a population of subjects; determining which subjects in the population are susceptible to treatment with an agent capable of inhibiting or reversing EMT or a chemotherapeutic agent; and, determining a “standard range” of values for subjects found to be susceptible to treatment with an agent capable of inhibiting or reversing EMT or a chemotherapeutic agent (that is, a responder subject) based on this assessment.

[3746] Where the control profile is a predetermined profile of biomarker expression, activity, or amount values, this may be provided as a “look-up table” or data record. Predetermined control profiles of this type may be a profile of numerical values or numerical ranges corresponding to a measure of central tendency (such as an average, median or mean) amount of the respective biomarkers determined in a plurality of control subjects (for example non-responder or responder subjects as outlined above). The skilled person is readily able to determine both a measure of central tendency and a measure of variability within a population using standard protein quantification techniques and suitable statistical tools.

[3747] Accordingly, in embodiments in which the control profile is: obtained from a population of control subjects having NSCLC; obtained from a population of control subjects not having NSCLC; obtained from a control subject or population of control subjects having NSCLC and previously found to lack susceptibility to treatment with an agent capable of inhibiting or reversing EMT or a chemotherapeutic agent (that is non-responder subjects); a predetermined profile of biomarker expression, activity, or amount values (for example a profile of “average, median, or mean” values or “standard ranges” of values) obtained from non-responder subjects; obtained from a control sample having a known “average, median, or mean” value of biomarkers indicative of non-responder subjects; a predetermined profile of biomarker expression, activity, or amount “threshold” values obtained from responder subjects; or, obtained from a control sample having a known “threshold” value of biomarkers indicative of responder subjects; then, a higher activity, expression, or amount of one or more of the biomarkers described herein in a sample profile as compared with the control profile may be indicative of susceptibility to treatment with an agent capable of inhibiting or reversing EMT or a chemotherapeutic agent. Similarly, a lower activity, expression, or amount of one or more of the biomarkers described herein in the sample profile as compared with a control profile may be indicative of susceptibility to treatment with an agent capable of inhibiting or reversing EMT or a chemotherapeutic agent.

[3748] In some such embodiments, the method may comprise assessing the activity, expression, or amount of one or more of biomarker selected from: MCP-3, SOD-1, BMP-9, IL-8, MIP-1 beta, MPO, VDBP and/or Axl; wherein a higher activity, expression, or amount of one or more of said biomarkers in the sample profile as compared with the control profile is indicative of susceptibility to treatment with an agent capable of inhibiting or reversing EMT or a chemotherapeutic agent.

[3749] In some such embodiments, the method may comprise assessing the activity, expression, or amount of one or more of biomarker selected from: NT proBNP, Endostatin, IGFBP-2, VEGF-D, GDF-15, AB-40, ALP, RAGE, CgA, HE4, ADM, B2M, Cystatin-C, Hepsin, and/or LDH; wherein a lower activity, expression, or amount of one or more of said biomarkers in the sample profile as compared with the control profile is indicative of susceptibility to treatment with an agent capable of inhibiting or reversing EMT or a chemotherapeutic agent.

[3750] In some such embodiments: and/or a lower activity, expression, or amount of NT proBNP; and/or a lower activity, expression, or amount of Endostatin; and/or a lower activity, expression, or amount of IGFBP-2; and/or a lower activity, expression, or amount of VEGF-D; and/or a lower activity, expression, or amount of GDF-15; and/or a lower activity, expression, or amount of AB-40; and/or a lower activity, expression, or amount of ALP; and/or a lower activity, expression, or amount of RAGE; and/or a lower activity, expression, or amount of CgA; and/or a lower activity, expression, or amount of HE4; and/or a lower activity, expression, or amount of ADM; and/or a lower activity, expression, or amount of B2M; and/or a lower activity, expression, or amount of Cystatin-C; and/or a lower activity, expression, or amount of Hepsin; and/or a lower activity, expression, or amount of LDH; and/or a higher activity, expression, or amount of MCP-3; and/or a higher activity, expression, or amount of SOD-1; and/or a higher activity, expression, or amount of BMP-9; and/or a higher activity, expression, or amount of IL-8; and/or a higher activity, expression, or amount of MIP-1 beta; and/or a higher activity, expression, or amount of MPO; and/or a higher activity, expression, or amount of VDBP; and/or a higher activity, expression, or amount of Axl; in the sample profile as compared with the control profile is indicative of susceptibility to treatment with an agent capable of inhibiting or reversing EMT or a chemotherapeutic agent.

[3751] In embodiments in which the control profile is: obtained from a control subject or population of control subjects having NSCLC and previously found to be susceptible to treatment with an agent capable of inhibiting or reversing EMT or a chemotherapeutic agent (that is, responder subjects); then, if the expression, activity, or amount values in the sample profile are above a “threshold” value typical of a responder subject (that is, a subject having NSCLC and previously found to be susceptible to treatment with an agent capable of inhibiting or reversing EMT or a chemotherapeutic agent) this is indicative of susceptibility to treatment with an agent capable of inhibiting or reversing EMT or a chemotherapeutic agent. Similarly, if the expression, activity, or amount values in the sample profile are below the “threshold” value typical of a responder subject (that is, a subject having NSCLC and previously found to be susceptible to treatment with an agent capable of inhibiting or reversing EMT or a chemotherapeutic agent) this is indicative of a lack of susceptibility to treatment with an agent capable of inhibiting or reversing EMT or a chemotherapeutic agent.

[3752] In embodiments in which the control profile is: a predetermined profile of “standard ranges” of biomarker expression, activity, or amount values obtained from responder subjects; then, if the expression, activity, or amount values in the sample profile are within the “standard range” of values typical of a responder subject (that is, a subject having NSCLC and previously found to be susceptible to treatment with an agent capable of inhibiting or reversing EMT or a chemotherapeutic agent) this is indicative of susceptibility to treatment with an agent capable of inhibiting or reversing EMT or a chemotherapeutic agent. Similarly, if the expression, activity, or amount values in the sample profile are outside the “standard range” of values typical of a responder subject (that is, a subject having NSCLC and previously found to be susceptible to treatment with an agent capable of inhibiting or reversing EMT or a chemotherapeutic agent) this is indicative of a lack of susceptibility to treatment with an agent capable of inhibiting or reversing EMT or a chemotherapeutic agent.

[3753] In embodiments in which the control profile is: a predetermined profile of “standard ranges” of biomarker expression, activity, or amount values obtained from non-responder subjects; then, if the expression, activity, or amount values in the sample profile are within the “standard range” of values typical of a non-responder subject (that is, a subject having NSCLC and previously found to lack susceptibility to treatment with an agent capable of inhibiting or reversing EMT or a chemotherapeutic agent) this is indicative of a lack of susceptibility to treatment with an agent capable of inhibiting or reversing EMT or a chemotherapeutic agent. Similarly, if the expression, activity, or amount values in the sample profile are outside the “standard range” of values typical of a non-responder subject (that is, a subject having NSCLC and previously found to lack susceptibility to treatment with an agent capable of inhibiting or reversing EMT or a chemotherapeutic agent) this may be indicative of susceptibility to treatment with an agent capable of inhibiting or reversing EMT or a chemotherapeutic agent.

[3754] In embodiments in which the control profile is: obtained from a population of control subjects not having NSCLC; then, if the expression, activity, or amount values in the sample profile are outside a “standard range” of values typical of subjects not having NSCLC, this is indicative of susceptibility to treatment with an agent capable of inhibiting or reversing EMT or a chemotherapeutic agent. Similarly, if the expression, activity, or amount values in the sample profile are within a “standard range” of values typical of subjects not having NSCLC, this is indicative of a lack of susceptibility to treatment with an agent capable of inhibiting or reversing EMT or a chemotherapeutic agent. In such cases, an expression, activity or amount value may be outside the “standard range” of values when it is either above the upper limit of normal or below the lower limit of normal for a given biomarker. The upper limit of normal and lower limit of normal are the limits of the normal distribution of a given biomarker in a population of control subjects not having NSCLC.

[3755] In embodiments in which the one or more biomarker comprises LDH, an expression or amount of LDH higher than 287 units per litre (U/L) may be indicative of susceptibility to treatment with an agent capable of inhibiting or reversing EMT or a chemotherapeutic agent.

[3756] The skilled person is readily able to determine whether the sample profile is indicative of susceptibility or lack of susceptibility to treatment with an agent capable of inhibiting or reversing EMT or a chemotherapeutic agent using suitable statistical tools and comparison with the appropriate control.

[3757] In some embodiments the sample profile may be compared with two or more control profiles as described above.

[3758] As used herein, the term “one or more” means 1, 2, 3, 4, 5, 6, 7, 8, 9, 10, 11, 12, 13, 14, 15, 16, 17, 18, 19, or 20 of the biomarkers described herein. In some embodiments the one or more biomarker is NT proBNP. In some embodiments the one or more biomarker is Endostatin. In some embodiments the one or more biomarker is IGFBP-2. In some embodiments the one or more biomarker is VEGF-D. In some embodiments the one or more biomarker is GDF-15. In some embodiments the one or more biomarker is AB-40. In some embodiments the one or more biomarker is ALP. In some embodiments the one or more biomarker is MCP-3. In some embodiments the one or more biomarker is SOD-1. In some embodiments the one or more biomarker is BMP-9. In some embodiments the one or more biomarker is IL-8. In some embodiments the one or more biomarker is MIP-1 beta. In some embodiments the one or more biomarker is RAGE. In some embodiments the one or more biomarker is MPO. In some embodiments the one or more biomarker is CgA. In some embodiments the one or more biomarker is HE4. In some embodiments the one or more biomarker is VDBP. In some embodiments the one or more biomarker is Cystatin-C. In some embodiments the one or more biomarker is Hepsin. In some embodiments the one or more biomarker is Axl. In some embodiments the one or more biomarker is LDH.

[3759] In some embodiments the method may comprise assessing the activity, expression, or amount of at least 2, 3, 4, 5, 6, 7, 8, 9, 10, 11, 12, 13, 14, 15, 20 of said biomarkers in the subject, or in a sample derived from the subject. In some preferred embodiments the method may comprise assessing the activity, expression, or amount of NT proBNP and at least 1, 2, 3, 4, 5, 6, 7, 8, 9, 10, 11, 12, 13, 14, 15, 20 further biomarkers described herein in the subject, or in a sample derived from the subject. In some preferred embodiments the method may comprise assessing the activity, expression, or amount of Endostatin and at least 1, 2, 3, 4, 5, 6, 7, 8, 9, 10, 11, 12, 13, 14, 15, 20 further biomarkers described herein in the subject, or in a sample derived from the subject. In some preferred embodiments the method may comprise assessing the activity, expression, or amount of IGFBP-2, and at least 1, 2, 3, 4, 5, 6, 7, 8, 9, 10, 11, 12, 13, 14, 15, 20 further biomarkers described herein in the subject, or in a sample derived from the subject. In some preferred embodiments the method may comprise assessing the activity, expression, or amount of VEGF-D, and at least 1, 2, 3, 4, 5, 6, 7, 8, 9, 10, 11, 12, 13, 14, 15, 20 further biomarkers described herein in the subject, or in a sample derived from the subject. In some preferred embodiments the method may comprise assessing the activity, expression, or amount of LDH, and at least 1, 2, 3, 4, 5, 6, 7, 8, 9, 10, 11, 12, 13, 14, 15, 20 further biomarkers described herein in the subject, or in a sample derived from the subject. In some preferred embodiments the method may comprise assessing the activity, expression, or amount of Axl, and at least 1, 2, 3, 4, 5, 6, 7, 8, 9, 10, 11, 12, 13, 14, 15, 20 further biomarkers described herein in the subject, or in a sample derived from the subject.

[3760] In some preferred embodiments the method may comprise assessing the activity, expression, or amount of NT proBNP, Endostatin, and at least 1, 2, 3, 4, 5, 6, 7, 8, 9, 10, 11, 12, 13, 14, 15, 20 further biomarkers described herein in the subject, or in a sample derived from the subject. In other preferred embodiments the method may comprise assessing the activity, expression, or amount of NT proBNP, IGFBP-2, and at least 1, 2, 3, 4, 5, 6, 7, 8, 9, 10, 11, 12, 13, 14, 15, 20 further biomarkers described herein in the subject, or in a sample derived from the subject. In some preferred embodiments the method may comprise assessing the activity, expression, or amount of NT proBNP, VEGF-D, and at least 1, 2, 3, 4, 5, 6, 7, 8, 9, 10, 11, 12, 13, 14, 15, 20 further biomarkers described herein in the subject, or in a sample derived from the subject. In some preferred embodiments the method may comprise assessing the activity, expression, or amount of Endostatin, IGFBP-2, and at least 1, 2, 3, 4, 5, 6, 7, 8, 9, 10, 11, 12, 13, 14, 15, 20 further biomarkers described herein in the subject, or in a sample derived from the subject. In some preferred embodiments the method may comprise assessing the activity, expression, or amount of AB-40, RAGE, VDBP, and at least 1, 2, 3, 4, 5, 6, 7, 8, 9, 10, 11, 12, 13, 14, 15, 20 further biomarkers described herein in the subject, or in a sample derived from the subject.

[3761] Subject

[3762] A “subject” as referred to herein is any species of animal classified as a mammal, and includes but is not restricted to, domestic and farm animals, primates and humans. In some preferred embodiments the subject is a human of any sex or race. In some embodiments, the human is an adult human.

[3763] In some embodiments the predictive methods described herein are performed before the subject receives a treatment or course of treatment for NSCLC. In other embodiments the predictive method is performed during or after a treatment or course of treatment for NSCLC. In some embodiments the treatment or course of treatment for NSCLC is an agent capable of inhibiting or reversing EMT. In other embodiments the treatment or course of treatment for NSCLC is a chemotherapeutic treatment that is not an agent capable of inhibiting or reversing EMT.

[3764] In some embodiments of the predictive methods described herein the subject has previously been treated with an agent capable of inhibiting or reversing EMT or a chemotherapeutic agent. In some embodiments the subject has previously been treated with an agent selected from: a PHGDH inhibitor, a Slfn11 inhibitor, an Axl inhibitor, or an Akt3 inhibitor.

[3765] In some embodiments of the predictive methods described herein the subject has previously been treated with an agent that is different to the agent capable of inhibiting or reversing EMT or chemotherapeutic agent for which the subject's response is being predicted. That is, the subject has previously been treated with an agent that is not the agent which the predictive method is determining the subject's susceptibility to. Accordingly, in some embodiments, the subject has not previously been treated with an agent capable of inhibiting or reversing EMT or a chemotherapeutic agent. In some preferred embodiments, the subject has not previously been treated with an Axl inhibitor. In other preferred embodiments, the subject has not previously been treated with an Akt3 inhibitor.

[3766] Post-Treatment Changes in Biomarkers

[3767] In some embodiments of this aspect of the disclosure, the predictive method further comprises a subsequent step of assessing the activity, expression, or amount of one or more biomarker in the subject, or in a sample derived from the subject, to obtain a second sample profile of one or more of the biomarkers described herein after the subject has received a treatment or course of treatment an agent capable of inhibiting or reversing EMT or a chemotherapeutic agent.

[3768] That is, in some embodiments, the predictive method comprises:
[3769] (a) determining if a subject is susceptible to treatment with an agent capable of inhibiting or reversing EMT or a chemotherapeutic agent by assessing the activity, expression, or amount of one or more biomarker in the subject, as outlined above;
[3770] (b) administering to the subject a therapeutically effective amount of an agent capable of inhibiting or reversing EMT or a chemotherapeutic agent; and
[3771] (c) subsequently assessing the activity, expression, or amount of one or more biomarker in the subject, or in a sample derived from the subject.

[3772] In some embodiments, the predictive method comprises:
[3773] (a) determining if a subject is susceptible to treatment with an agent capable of inhibiting or reversing EMT or a chemotherapeutic agent by assessing the activity, expression, or amount of one or more biomarker in the subject, or in a sample derived from the subject, wherein the one or more biomarker is selected from the group consisting of NT proBNP, Endostatin, IGFBP-2, VEGF-D, GDF-15, AB-40, ALP, MCP-3, SOD-1, BMP-9, IL-8, MIP-1 beta, RAGE, MPO, CgA, HE4, ADM, B2M, VDBP, Cystatin-C, Hepsin, LDH, and/or Axl;
[3774] (b) administering to the subject a therapeutically effective amount of an agent capable of inhibiting or reversing EMT or a chemotherapeutic agent; and
[3775] (c) subsequently assessing the activity, expression, or amount of one or more biomarker in the subject, or in a sample derived from the subject.

[3776] In some preferred embodiments the methods comprise subsequently assessing the activity, expression, or amount of Axl in the subject, or in a sample derived from the subject. In some embodiments an increase in the activity, expression, or amount of Axl in the second sample profile as compared with a control profile after contacting the subject with a cancer therapeutic agent is indicative of higher susceptibility to treatment with an agent capable of inhibiting or reversing EMT or a chemotherapeutic agent. In some preferred embodiments the control profile is obtained from the same subject prior to treatment with an agent capable of inhibiting or reversing EMT or a chemotherapeutic agent.

[3777] Post-Treatment Predictive Biomarkers and Methods

[3778] By analysing further patient data obtained from clinical trial BGBC008 (NCT03184571) the authors have discovered that, following treatment of subjects having NSCLC with an agent capable of inhibiting or reversing EMT or a chemotherapeutic agent, the levels of certain of the biomarkers described herein increases in the serum of “responder” subjects but not in the serum of “non-responder” subjects. Similarly, following treatment with an agent capable of inhibiting or reversing EMT or a chemotherapeutic agent, the levels of certain of the biomarkers described herein decreases in the serum of “responder” subjects but not in the serum of “non-responder” subjects. Thus, by assessing the activity, expression, or amount of one or more of the biomarkers described herein prior to and following treatment with an agent capable of inhibiting or reversing EMT or a chemotherapeutic agent it is possible to determine or confirm that the subject is susceptible or responsive to treatment with said agent.

[3779] Accordingly, in a second aspect of this facet the disclosure provides a method of predicting a cancer-related outcome in a subject having, suspected of having, or diagnosed with non-small cell lung cancer (NSCLC), the method comprising assessing the activity, expression, or amount of one or more of the biomarkers described herein in a subject, or in a sample derived from the subject after the subject has been contacted with an agent capable of inhibiting or reversing EMT or a chemotherapeutic agent. In some embodiments the cancer-related outcome is susceptibility to treatment with an agent capable of inhibiting or reversing EMT or a chemotherapeutic agent.

[3780] In some embodiments the method comprises assessing the activity, expression, or amount of one or more of the biomarkers described herein in the subject, or in a sample derived from the subject, to obtain a sample profile of the one or more biomarker; and, making a prediction based on the sample profile of the one or more biomarker. In some embodiments of the method the prediction is made by comparing the sample profile to a control profile. In preferred embodiments the sample profile is obtained after contacting the subject with an agent capable of inhibiting or reversing EMT or a chemotherapeutic agent.

[3781] A “control profile” as used herein is a profile of numerical values or numerical ranges corresponding to the activity, expression, or amount of the same biomarkers as for the sample profile, determined in a control subject or population of control subjects.

[3782] In preferred embodiments of this aspect of the disclosure the control profile is obtained from the same subject prior to treatment with an agent capable of inhibiting or reversing EMT or a chemotherapeutic agent. In some embodiments the control profile is obtained from a population of control subjects having NSCLC. In other embodiments, the control profile is a predetermined profile of biomarker expression, activity, or amount values, for example a profile of “threshold” values or “standard ranges” of values.

[3783] Accordingly, in embodiments in which the control profile is obtained from the same subject prior to treatment with an agent capable of inhibiting or reversing EMT or a chemotherapeutic agent, an increase in the activity, expression, or amount of one or more biomarker in the sample profile as compared with a control profile after contacting the subject with an agent capable of inhibiting or reversing EMT or a cancer therapeutic agent may be indicative of susceptibility to treatment with an agent capable of inhibiting or reversing EMT or a chemotherapeutic agent. In such embodiments, a decrease in the activity, expression, or amount of one or more biomarker in the sample profile as compared with a control profile after contacting the subject with a cancer therapeutic agent may be indicative of higher susceptibility to treatment with an agent capable of inhibiting or reversing EMT or a chemotherapeutic agent.

[3784] In some such embodiments, an increase in the activity, expression, or amount of one or more biomarker in the sample profile as compared with a control profile after contacting the subject with a cancer therapeutic agent may be indicative of lower susceptibility to treatment with an agent capable of inhibiting or reversing EMT or a chemotherapeutic agent. In some such embodiments, a decrease in the activity, expression, or amount of one or more biomarker in the sample profile as compared with a control profile after contacting the subject with a cancer therapeutic agent may be indicative of lower susceptibility to treatment with an agent capable of inhibiting or reversing EMT or a chemotherapeutic agent.

[3785] In some preferred embodiments the one or more biomarker includes at least Axl. In some embodiments the one or more biomarker is Axl. In some embodiments an increase in the activity, expression, or amount of Axl in the sample profile as compared with a control profile after contacting the subject with a cancer therapeutic agent is indicative of higher susceptibility to treatment with an agent capable of inhibiting or reversing EMT or a chemotherapeutic agent.

[3786] Subject

[3787] A “subject” as referred to herein is any species of animal classified as a mammal, and includes but is not restricted to, domestic and farm animals, primates and humans. In some preferred embodiments the subject is a human of any sex or race. In some embodiments, the human is an adult human.

[3788] In some embodiments of this aspect of the disclosure, the subject was selected for treatment with the agent capable of inhibiting or reversing EMT or a chemotherapeutic agent, using a predictive method according to the first aspect of this facet of the disclosure outlined above.

[3789] Agents Capable of Inhibiting or Reversing EMT

[3790] The present disclosure provides methods for predicting a cancer-related outcome in a subject having, suspected of having, or diagnosed with non-small cell lung cancer (NSCLC). A “cancer-related outcome” is a clinical prediction or prognosis associated with cancer.

[3791] The agents capable of inhibiting or reversing EMT for use in this NSCLC facet of the disclosure are defined as described above in the AML facet (see identically titled section above on page 14, line 19 to page 17, line 2).

[3792] In some preferred embodiments the further cancer treatment is a PD-1 inhibitor or PD-L1 inhibitor. In some embodiments the further cancer treatment is a monoclonal antibody such as pembrolizumab, alemtuzumab, bevacizumab, cetuximab, ibritumomab, tiuxetan, or rituximab. In some preferred embodiments the further cancer treatment is a microtubule polymer stabilizer such as the taxanes paclitaxel and docetaxel. In some preferred embodiments the further cancer treatment is a tyrosine kinase inhibitors such as erlotinib hydrochloride, gefitinib, imatinib mesylate, and semaxanib. In some particularly preferred embodiments the further cancer treatment is pembrolizumab. In other particularly preferred embodiments the further cancer treatment is docetaxel. In yet other particularly preferred embodiments the further cancer treatment is erlotinib.

[3793] Assessing Biomarker Activity, Expression, Amount

[3794] In some embodiments of the predictive methods described herein, assessing the activity, expression, or amount of one or more biomarker in a subject, or in a sample derived from a subject, comprises: contacting a sample, or an extract from a sample, with at least 1, 2, 3, 4, 5, 6, 7, 8, 9, 10 or more reagents for detecting the activity, expression, or amount of one or more biomarkers, each of which is selective for a particular biomarker; and, detecting and/or quantifying said reagents for detecting.

[3795] In some embodiments comprising assessing the activity of LDH, assessing the activity of LDH comprises determining the enzymatic activity of LDH in the subject or sample derived from the subject. Preferably the enzymatic activity is assessed by determining the level or amount of a substrate or product of the enzymatic reaction catalysed by LDH in the subject or sample derived from the subject. In particularly preferred embodiments the enzymatic activity is assessed by determining the level or amount of reduced nicotinamide adenine dinucleotide (NADH) in the subject or sample derived from the subject. In some embodiments this may be determined using a colorimetric assay, for example, the colorimetric assay available from Sigma-Aldrich with catalogue number MAK066. Other suitable assays for assessing activity of LDH are well known to the skilled person. In particularly preferred embodiments the activity of LDH is assessed by determining the enzymatic activity of LDH in blood or serum.

[3796] In some preferred embodiments, assessing the expression or amount of the one or more biomarker comprises determining the level of the one or more biomarker protein or mRNA in the subject or sample derived from the subject. Preferably the expression or amount of the one or more biomarker is assessed by determining the level of protein expression. In particularly preferred embodiments the expression or amount of the one or more biomarker is assessed by determining the level of protein expression in serum.

[3797] The term “expression” refers to the transcription of a gene's DNA template to produce the corresponding mRNA and translation of this mRNA to produce the corresponding gene product (i.e., a peptide, polypeptide, or protein) as well as the “expression” of a protein in one or more forms that may have been modified post translation.

[3798] In some embodiments determining the level of the one or more biomarker protein or mRNA comprises: contacting a sample, or an extract from a sample, with at least 1, 2, 3, 4, 5, 6, 7, 8, 9, 10 or more specific binding members, each of which selectively binds to a respective biomarker protein or mRNA; and, detecting and/or quantifying formation of complex formed by said specific binding member and said biomarker protein or mRNA. In some embodiments the specific binding member may comprise an antibody molecule or a binding fragment thereof.

[3799] A range of suitable techniques for determining protein and mRNA expression levels are well known in the art, for example microarray analysis, Western blotting, and PCR techniques such as QPCR. In some embodiments, determining the expression or amount of the one or more biomarker protein or mRNA may comprise use of a technique selected from: Western blot; enzyme-linked immunosorbent assay (ELISA); radioimmunoassay (RIA); competitive enzyme immunoassay; double antibody sandwich ELISA (DAS-ELISA); liquid immunoarray technology; immunocytochemistry; immunohistochemistry; antibody microarray detection; precipitation of colloidal gold; affinity chromatography; ligand binding assay; and lectin binding assay.

[3800] In some embodiments, the expression or amount of the one or more biomarker is determined as an absolute amount of the respective biomarker protein or mRNA in the sample. In such cases, the respective biomarker protein or mRNA may be quantified in the sample and the amount expressed as a measure of the sample, for example the volume, mass, or total protein content of the sample.

[3801] In some embodiments, the expression or amount of the one or more biomarker is determined as a relative amount of the respective biomarker protein or mRNA in the sample, wherein the relative amount is determined relative to a reference protein or mRNA in the sample. Determining the relative amount of biomarker protein or mRNA in this way allows for normalisation to, e.g., account for differences in total protein concentration and to remove bias from sample to sample.

[3802] Preferably the reference protein or mRNA is one whose expression or amount does not vary significantly between subjects having cancer and subjects not having cancer, in particular NSCLC. That is, the reference protein or mRNA is preferably one whose expression or amount is not altered by NSCLC. Accordingly, the reference protein or mRNA may comprise one or more protein or mRNA which is not one of the biomarkers described herein. When expressing the expression or amount of the one or more biomarker as a relative amount, the absolute amount of the respective biomarker protein or mRNA in the sample may be divided by the absolute amount of the reference protein or mRNA in the sample.

[3803] Assessing Biomarker Expression at the RNA Level

[3804] Gene expression can be detected at the RNA level. RNA may be extracted from cells using RNA extraction techniques including, for example, using acid phenol/guanidine isothiocyanate extraction (RNAzol B; Biogenesis), RNeasy RNA preparation kits (Qiagen) or PAXgene (PreAnalytix, Switzerland). Typical assay formats utilising ribonucleic acid hybridisation include nuclear run-on assays, RT-PCR, RNase protection assays (Melton et al., Nuc. Acids Res. 12:7035), Northern blotting and In Situ hybridization. Gene expression can also be detected by microarray analysis as described below.

[3805] Assessing Biomarker Expression at the Protein Level

[3806] Preferably biomarker level is assessed by measuring protein expression. Altered gene or protein expression may also be detected by measuring the polypeptides encoded by the gene. This may be achieved by using molecules which bind to the polypeptides encoded by the biomarker gene. Suitable molecules/agents which bind either directly or indirectly to the polypeptides in order to detect the presence of the protein include naturally occurring molecules such as peptides and proteins, for example antibodies, or they may be synthetic molecules.

[3807] Antibodies may be derived from commercial sources or through techniques which are familiar to those skilled in the art. In one embodiment, and where altered expression manifests itself through the expression of alteration of post translationally-modified forms of a protein biomarker, antibodies specific for those different forms may be used. For the purposes of this disclosure, the term “antibody”, unless specified to the contrary, includes whole antibodies, or fragments of whole antibodies which retain their binding activity for a target antigen. Such fragments include Fv, F(ab′) and F(ab′)2 fragments, as well as single chain antibodies (scFv). Furthermore, the antibodies and fragments thereof may be humanised antibodies, for example as described in EP239400A. For example: monoclonal and polyclonal antibodies, recombinant antibodies, proteolytic and recombinant fragments of antibodies (Fab, Fv, scFv, diabodies), single-domain antibodies (VHH, sdAb, nanobodies, IgNAR, VNAR), and proteins unrelated to antibodies, which have been engineered to have antibody-like specific binding. Antibodies may be bound to a solid support and/or packaged into kits in a suitable container along with suitable reagents, controls, instructions and the like.

[3808] Arrays

[3809] Array technology and the various techniques and applications associated with it are well known in the art. Array technology overcomes the disadvantages with traditional methods in molecular biology, which generally work on a “one gene in one experiment” basis, resulting in low throughput and the inability to appreciate the “whole picture” of gene function. In the context of the products and methods of the present disclosure, array technology can be used, for example, in the analysis of the expression of biomarker proteins or mRNA.

[3810] In general, any library or group of samples may be arranged in an orderly manner into an array, by spatially separating the members of the library or group. Examples of suitable libraries for arraying include nucleic acid libraries (including DNA, cDNA, oligonucleotide, etc. libraries), peptide, polypeptide and protein libraries, as well as libraries comprising any molecules, such as ligand libraries, among others. Accordingly, where reference is made to a “library” in this document, unless the context dictates otherwise, such reference should be taken to include reference to a library in the form of an array.

[3811] Proteins, polypeptides, etc., may also be immobilised in arrays. For example, antibodies have been used in microarray analysis of the proteome using protein chips (Borrebaeck C A, 2000, Immunol Today 21(8):379-82). Polypeptide arrays are reviewed in, for example, MacBeath and Schreiber, 2000, Science, 289(5485):1760-1763.

[3812] Sample

[3813] Suitable samples include, but are not limited to, tissue samples such as tissue biopsy, blood, urine, buccal scrapes etc., as well as serum, plasma, or tissue culture supernatant samples. In preferred embodiments the expression or amount of the one or more biomarker is assessed by determining the level of protein expression in the sample. In some preferred embodiments the sample is a blood, serum, or plasma sample. In some particularly preferred embodiments the sample is a serum sample.

[3814] When assessing the expression or amount of the one or more biomarker proteins or mRNA in serum or plasma samples derived from a subject, samples are removed and subjected to analytical techniques such as flow cytometry, mass cytometry (CyTOF), ELISA, PET, and SELDI-TOF MS. In some embodiments, the method may comprise extracting RNA from said sample and detecting gene expression by QPCR. In some other embodiments, gene expression may be detected by detecting protein products by, for example, Western Blot.

[3815] In some embodiments, the level of expression of the one or more biomarker is assessed by determining the copy number of the gene encoding the one or more biomarker. Copy number (i.e. gene duplication events) may be determined using standard techniques known in the art, e.g. using a DNA chip as described in Jiang et al. (Jiang Q, Ho Y Y, Hao L, Nichols Berrios C, Chakravarti A. Copy number variants in candidate genes are genetic modifiers of Hirschsprung disease. PLoS One. 2011; 6(6)).

[3816] Is some preferred embodiments of the predictive methods described herein, the method is performed in vitro or ex vivo.

[3817] Methods of Selecting a Subject for Treatment

[3818] A third aspect of this facet of the present disclosure relates to methods of selecting subjects having, suspected of having, or diagnosed with non-small cell lung cancer (NSCLC) for treatment with an agent capable of inhibiting or reversing EMT or a chemotherapeutic agent. In some embodiments the method comprises: identifying subjects susceptible to treatment with an agent capable of inhibiting or reversing EMT or a chemotherapeutic agent using a predictive method defined in accordance with the above described first and second aspects of this facet of the disclosure; and, selecting thus identified subjects for treatment.

[3819] In some embodiments this aspect relates to methods of selecting subjects having, suspected of having, or diagnosed with non-small cell lung cancer (NSCLC) for continued treatment with an agent capable of inhibiting or reversing EMT or a chemotherapeutic agent. In some embodiments the method comprises: identifying subjects susceptible to treatment with an agent capable of inhibiting or reversing EMT or a chemotherapeutic agent using a predictive method defined in accordance with the above described second aspect of this facet of the disclosure; and, selecting thus identified subjects for treatment.

[3820] In some embodiments of this aspect of the disclosure, the treatment comprises administering to the subject a therapeutically effective amount of an agent capable of inhibiting or reversing EMT or a chemotherapeutic agent as described herein. Accordingly, in some embodiments the treatment comprises an Axl inhibitor, Akt3 inhibitor, Slfn11 inhibitor, or PHGDH inhibitor. In some preferred embodiments the treatment comprises an Axl inhibitor, for example, BGB324/R428/bemcentinib, cabozantinib, TP-0903, foretinib, merestinib, bosutinib, gilteritinib, crizotinib, amuvatinib, sunitinib, sitravatinib, LDC1267, or UNC2025. Other Axl inhibitors include the anti-Axl antibodies described in WO2015/193428, WO2015/193430, WO2016/097370, and WO2016/166296. In some preferred embodiments the Axl inhibitor is an anti-Axl antibody described in WO2015/193428, WO2015/193430, WO2016/097370, or WO2016/166296. In some particularly preferred embodiments the Axl inhibitor is BGB324/R428/bemcentinib.

[3821] In some other preferred embodiments, the treatment comprises an Akt3 inhibitor. In some embodiments the Akt3 inhibitor is an Akt3 inhibitor disclosed in WO2016/102672.

[3822] In some embodiments of this aspect of the disclosure, the treatment is administered as a single agent. In other embodiments, the treatment is administered in combination with a further cancer treatment. Suitable further cancer treatments are outlined in detail above.

[3823] In some preferred embodiments the further cancer treatment is a PD-1 inhibitor or PD-L1 inhibitor. In some embodiments the further cancer treatment is a monoclonal antibody such as pembrolizumab, alemtuzumab, bevacizumab, cetuximab, ibritumomab, tiuxetan, or rituximab. In some preferred embodiments the further cancer treatment is a microtubule polymer stabilizer such as the taxanes paclitaxel and docetaxel. In some preferred embodiments the further cancer treatment is a tyrosine kinase inhibitor such as erlotinib hydrochloride, gefitinib, imatinib mesylate, and semaxanib. In some particularly preferred embodiments the further cancer treatment is pembrolizumab. In other particularly preferred embodiments the further cancer treatment is docetaxel. In yet other particularly preferred embodiments the further cancer treatment is erlotinib.

[3824] Kits

[3825] A fourth aspect of this facet of the present disclosure relates to diagnostic kits and test devices. In some embodiments the disclosure provides a diagnostic kit comprising 1, 2, 3, 4, 5, 6, 7, 8, 9, 10 or more reagents for detecting the activity, expression, or amount of one or more of the biomarkers described herein, each of which is selective for a particular biomarker. In some embodiments each of the reagents for detecting is selective for a biomarker selected from the group consisting of: NT proBNP, Endostatin, IGFBP-2, VEGF-D, GDF-15, AB-40, ALP, MCP-3, SOD-1, BMP-9, IL-8, MIP-1 beta, RAGE, MPO, CgA, HE4, ADM, B2M, VDBP, Cystatin-C, Hepsin, LDH, and/or Axl.

[3826] In some embodiments the diagnostic kit or test device comprises 1, 2, 3, 4, 5, 6, 7, 8, 9, 10 or more specific binding members, each of which selectively binds to one of the biomarkers described herein; and, one or more reagents for detecting said one or more specific binding members, or one or more reagents for detecting and/or quantifying formation of a complex formed by said specific binding member and said biomarker. In some embodiments each specific binding member selectively binds to a biomarker selected from the group consisting of: NT proBNP, Endostatin, IGFBP-2, VEGF-D, GDF-15, AB-40, ALP, MCP-3, SOD-1, BMP-9, IL-8, MIP-1 beta, RAGE, MPO, CgA, HE4, ADM, B2M, VDBP, Cystatin-C, Hepsin, LDH, and/or Axl.

[3827] In some embodiments each reagent for detecting or specific binding member is selective for a biomarker selected from the group: NT proBNP, Endostatin, IGFBP-2, VEGF-D, GDF-15, AB-40, ALP, MCP-3, SOD-1, BMP-9, IL-8, MIP-1 beta, RAGE, MPO, CgA, HE4, ADM, B2M, VDBP, Cystatin-C, Hepsin, LDH, and/or Axl.

[3828] In some embodiments the diagnostic kit or test device comprises a specific binding member which selectively binds to NT proBNP, and at least 1, 2, 3, 4, 5, 6, 7, 8, 9, 10, or more specific binding members, each of which selectively binds to a biomarker selected from the group consisting of: Endostatin, IGFBP-2, VEGF-D, GDF-15, AB-40, ALP, MCP-3, SOD-1, BMP-9, IL-8, MIP-1 beta, RAGE, MPO, CgA, HE4, ADM, B2M, VDBP, Cystatin-C, Hepsin, LDH, and/or Axl.

[3829] In some embodiments the diagnostic kit or test device comprises a specific binding member which selectively binds to Endostatin, and at least 1, 2, 3, 4, 5, 6, 7, 8, 9, 10, or more specific binding members, each of which selectively binds to a biomarker selected from the group consisting of NT proBNP, IGFBP-2, VEGF-D, GDF-15, AB-40, ALP, MCP-3, SOD-1, BMP-9, IL-8, MIP-1 beta, RAGE, MPO, CgA, HE4, ADM, B2M, VDBP, Cystatin-C, Hepsin, LDH, and/or Axl.

[3830] In some embodiments the diagnostic kit or test device comprises a specific binding member which selectively binds to IGFBP-2, and at least 1, 2, 3, 4, 5, 6, 7, 8, 9, 10, or more specific binding members, each of which selectively binds to a biomarker selected from the group consisting of: NT proBNP, Endostatin, VEGF-D, GDF-15, AB-40, ALP, MCP-3, SOD-1, BMP-9, IL-8, MIP-1 beta, RAGE, MPO, CgA, HE4, ADM, B2M, VDBP, Cystatin-C, Hepsin, LDH, and/or Axl.

[3831] In some embodiments the diagnostic kit or test device comprises a specific binding member which selectively binds to VEGF-D, and at least 1, 2, 3, 4, 5, 6, 7, 8, 9, 10, or more specific binding members, each of which selectively binds to a biomarker selected from the group consisting of: NT proBNP, Endostatin, IGFBP-2, GDF-15, AB-40, ALP, MCP-3, SOD-1, BMP-9, IL-8, MIP-1 beta, RAGE, MPO, CgA, HE4, ADM, B2M, VDBP, Cystatin-C, Hepsin, LDH, and/or Axl.

[3832] In some embodiments the diagnostic kit or test device comprises a specific binding member which selectively binds to GDF-15, and at least 1, 2, 3, 4, 5, 6, 7, 8, 9, 10, or more specific binding members, each of which selectively binds to a biomarker selected from the group consisting of: NT proBNP, Endostatin, IGFBP-2, VEGF-D, AB-40, ALP, MCP-3, SOD-1, BMP-9, IL-8, MIP-1 beta, RAGE, MPO, CgA, HE4, ADM, B2M, VDBP, Cystatin-C, Hepsin, LDH, and/or Axl.

[3833] In some embodiments the diagnostic kit or test device comprises a specific binding member which selectively binds to AB-40, and at least 1, 2, 3, 4, 5, 6, 7, 8, 9, 10, or more specific binding members, each of which selectively binds to a biomarker selected from the group consisting of: NT proBNP, Endostatin, IGFBP-2, VEGF-D, GDF-15, ALP, MCP-3, SOD-1, BMP-9, IL-8, MIP-1 beta, RAGE, MPO, CgA, HE4, ADM, B2M, VDBP, Cystatin-C, Hepsin, LDH, and/or Axl.

[3834] In some embodiments the diagnostic kit or test device comprises a specific binding member which selectively binds to AB-40, a specific binding member which selectively binds to RAGE, and at least 1, 2, 3, 4, 5, 6, 7, 8, 9, 10, or more specific binding members, each of which selectively binds to a biomarker selected from the group consisting of: NT proBNP, Endostatin, IGFBP-2, VEGF-D, GDF-15, ALP, MCP-3, SOD-1, BMP-9, IL-8, MIP-1 beta, MPO, CgA, HE4, ADM, B2M, VDBP, Cystatin-C, Hepsin, LDH, and/or Axl.

[3835] In some embodiments the diagnostic kit or test device comprises a specific binding member which selectively binds to AB-40, a specific binding member which selectively binds to RAGE, a specific binding member which selectively binds to VDBP, and at least 1, 2, 3, 4, 5, 6, 7, 8, 9, 10, or more specific binding members, each of which selectively binds to a biomarker selected from the group consisting of: NT proBNP, Endostatin, IGFBP-2, VEGF-D, GDF-15, ALP, MCP-3, SOD-1, BMP-9, IL-8, MIP-1 beta, MPO, CgA, HE4, ADM, B2M, Cystatin-C, Hepsin, LDH, and/or Axl.

[3836] In some embodiments of this aspect of the disclosure the diagnostic kit or test device comprises a plurality of said specific binding members provided in the form of an array on a substrate or conjugated to a plurality of particles, such as beads or microspheres. The particles may be encoded with a detectable label. In some embodiments the specific binding member comprises an antibody molecule or a binding fragment thereof.

[3837] In some embodiments of the diagnostic kit or test device detecting formation of a complex formed by a specific binding member and a biomarker is carried out by use of a technique selected from: Western blot; enzyme-linked immunosorbent assay (ELISA); radioimmunoassay (RIA); competitive enzyme immunoassay; double antibody sandwich ELISA (DAS-ELISA); liquid immunoarray technology; immunocytochemistry; immunohistochemistry; antibody microarray detection; precipitation of colloidal gold; affinity chromatography; ligand binding assay; and lectin binding assay.

[3838] In some embodiments of the diagnostic kit or test device, the kit or test device comprises no more than 15, 20, 25, 30, 40, or 50 reagents for detecting. In some embodiments of the diagnostic kit or test device, the kit or test device comprises no more than 15, 20, 25, 30, 40, or 50 specific binding members.

[3839] The present disclosure also provides use of such diagnostic kits and test devices in methods of predicting a cancer-related outcome in a subject. In preferred embodiments the cancer-related outcome is susceptibility to treatment with an agent capable of inhibiting or reversing EMT or a chemotherapeutic agent as described herein.

[3840] In some embodiments the agent capable of inhibiting or reversing EMT or chemotherapeutic agent is an Axl inhibitor, Akt3 inhibitor, Slfn11 inhibitor, or PHGDH inhibitor. In some preferred embodiments the agent capable of inhibiting or reversing EMT or chemotherapeutic agent is an Axl inhibitor, for example BGB324/R428/bemcentinib, cabozantinib, TP-0903, foretinib, merestinib, bosutinib, gilteritinib, crizotinib, amuvatinib, sunitinib, sitravatinib, LDC1267, or UNC2025. Other Axl inhibitors include the anti-Axl antibodies described in WO2015/193428, WO2015/193430, WO2016/097370, and WO2016/166296. In some preferred embodiments the Axl inhibitor is an anti-Axl antibody described in WO2015/193428, WO2015/193430, WO2016/097370, or WO2016/166296. In some particularly preferred embodiments the Axl inhibitor is BGB324/R428/bemcentinib.

[3841] In some embodiments of the diagnostic kit or test device for use in a predictive method, the subject has, is suspected of having, or has been diagnosed with NSCLC.

[3842] In some embodiments the method may be as defined in accordance with the above described first and second aspects of this facet of the disclosure.

[3843] A fifth aspect of this facet of the present disclosure relates to the use of a reagent for detecting the activity, expression, or amount of a biomarker selected from the group consisting of: NT proBNP, Endostatin, IGFBP-2, VEGF-D, GDF-15, AB-40, ALP, MCP-3, SOD-1, BMP-9, IL-8, MIP-1 beta, RAGE, MPO, CgA, HE4, ADM, B2M, VDBP, Cystatin-C, Hepsin, LDH, and/or Axl, in a method of predicting a cancer-related outcome in a subject.

[3844] A sixth aspect of this facet of the disclosure relates to the use of 1, 2, 3, 4, 5, 6, 7, 8, 9, 10 or more reagents for detecting the activity, expression, or amount a biomarker, each of which is selective for a particular biomarker selected from the group consisting of: NT proBNP, Endostatin, IGFBP-2, VEGF-D, GDF-15, AB-40, ALP, MCP-3, SOD-1, BMP-9, IL-8, MIP-1 beta, RAGE, MPO, CgA, HE4, ADM, B2M, VDBP, Cystatin-C, Hepsin, LDH, and/or Axl, in a method of manufacture of a diagnostic kit or test device for use in a method of predicting a cancer-related outcome in a subject. In some embodiments of these uses the reagent for detecting comprises a specific binding member selective for a particular biomarker.

[3845] The specific binding member may comprise an antibody molecule or a binding fragment thereof.

[3846] In some embodiments the method may be as defined in accordance with the above described first and second aspects of this facet of the disclosure.

[3847] Uses

[3848] A seventh aspect of this facet of the present disclosure relates to the use of one or more of: NT proBNP, Endostatin, IGFBP-2, VEGF-D, GDF-15, AB-40, ALP, MCP-3, SOD-1, BMP-9, IL-8, MIP-1 beta, RAGE, MPO, CgA, HE4, ADM, B2M, VDBP, Cystatin-C, Hepsin, LDH, and/or Axl, as a biomarker for determining if a subject is susceptible to treatment with an agent capable of inhibiting or reversing EMT or a chemotherapeutic agent.

[3849] In some embodiments the use relates to use of NT proBNP and at least 1, 2, 3, 4, 5, 6, 7, 8, 9, 10, or more of: Endostatin, IGFBP-2, VEGF-D, GDF-15, AB-40, ALP, MCP-3, SOD-1, BMP-9, IL-8, MIP-1 beta, RAGE, MPO, CgA, HE4, ADM, B2M, VDBP, Cystatin-C, Hepsin, LDH, and/or Axl, as a biomarker for determining if a subject is susceptible to treatment with an agent capable of inhibiting or reversing EMT or a chemotherapeutic agent. In some embodiments the use relates to use of Endostatin, and at least 1, 2, 3, 4, 5, 6, 7, 8, 9, 10, or more of: NT proBNP, IGFBP-2, VEGF-D, GDF-15, AB-40, ALP, MCP-3, SOD-1, BMP-9, IL-8, MIP-1 beta, RAGE, MPO, CgA, HE4, ADM, B2M, VDBP, Cystatin-C, Hepsin, LDH, and/or Axl, as a biomarker for determining if a subject is susceptible to treatment with an agent capable of inhibiting or reversing EMT or a chemotherapeutic agent.

[3850] In some embodiments the use relates to use of IGFBP-2, and at least 1, 2, 3, 4, 5, 6, 7, 8, 9, 10, or more of: NT proBNP, Endostatin, VEGF-D, GDF-15, AB-40, ALP, MCP-3, SOD-1, BMP-9, IL-8, MIP-1 beta, RAGE, MPO, CgA, HE4, ADM, B2M, VDBP, Cystatin-C, Hepsin, LDH, and/or Axl, as a biomarker for determining if a subject is susceptible to treatment with an agent capable of inhibiting or reversing EMT or a chemotherapeutic agent.

[3851] In some embodiments the use relates to use of VEGF-D, and at least 1, 2, 3, 4, 5, 6, 7, 8, 9, 10, or more of: NT proBNP, IGFBP-2, Endostatin, GDF-15, AB-40, ALP, MCP-3, SOD-1, BMP-9, IL-8, MIP-1 beta, RAGE, MPO, CgA, HE4, ADM, B2M, VDBP, Cystatin-C, Hepsin, LDH, and/or Axl, as a biomarker for determining if a subject is susceptible to treatment with an agent capable of inhibiting or reversing EMT or a chemotherapeutic agent.

[3852] In some embodiments the use relates to use of GDF-15, and at least 1, 2, 3, 4, 5, 6, 7, 8, 9, 10, or more of: NT proBNP, IGFBP-2, Endostatin, VEGF-D, AB-40, ALP, MCP-3, SOD-1, BMP-9, IL-8, MIP-1 beta, RAGE, MPO, CgA, HE4, ADM, B2M, VDBP, Cystatin-C, Hepsin, LDH, and/or Axl, as a biomarker for determining if a subject is susceptible to treatment with an agent capable of inhibiting or reversing EMT or a chemotherapeutic agent.

[3853] In some embodiments the use relates to use of AB-40, and at least 1, 2, 3, 4, 5, 6, 7, 8, 9, 10, or more of: NT proBNP, IGFBP-2, Endostatin, VEGF-D, GDF-15, ALP, MCP-3, SOD-1, BMP-9, IL-8, MIP-1 beta, RAGE, MPO, CgA, HE4, ADM, B2M, VDBP, Cystatin-C, Hepsin, LDH, and/or Axl, as a biomarker for determining if a subject is susceptible to treatment with an agent capable of inhibiting or reversing EMT or a chemotherapeutic agent.

[3854] In some preferred embodiments the one or more biomarker is NT proBNP. In some preferred embodiments the one or more biomarker is Endostatin. In some preferred embodiments the one or more biomarker is IGFBP-2. In some preferred embodiments the one or more biomarker is VEGF-D. In some preferred embodiments the one or more biomarker is GDF-15. In some preferred embodiments the one or more biomarker is AB-40. In some preferred embodiments the one or more biomarker is ALP. In some preferred embodiments the one or more biomarker is MCP-3. In some preferred embodiments the one or more biomarker is SOD-1. In some preferred embodiments the one or more biomarker is BMP-9. In some preferred embodiments the one or more biomarker is IL-8. In some preferred embodiments the one or more biomarker is MIP-1 beta. In some preferred embodiments the one or more biomarker is RAGE. In some preferred embodiments the one or more biomarker is MPO. In some preferred embodiments the one or more biomarker is CgA. In some preferred embodiments the one or more biomarker is HE4. In some preferred embodiments the one or more biomarker is ADM. In some preferred embodiments the one or more biomarker is B2M. In some preferred embodiments the one or more biomarker is VDBP. In some preferred embodiments the one or more biomarker is Cystatin-C. In some preferred embodiments the one or more biomarker is Hepsin. In some preferred embodiments the one or more biomarker is LDH. In some preferred embodiments the one or more biomarker is Axl.

[3855] In some embodiments the use is as a biomarker in a method as defined in accordance with the above described first and second aspects of this facet of the disclosure.

[3856] Methods of Treating a Subject

[3857] A eighth aspect of this facet of the present disclosure relates to methods of treating a subject having, suspected of having, or diagnosed with non-small cell lung cancer (NSCLC). In some embodiments the method comprises: identifying a subject for treatment using a predictive method defined in accordance with the above described first and second aspects of this facet of the disclosure; and, administering to the subject a therapeutically effective amount of an agent capable of inhibiting or reversing EMT or a chemotherapeutic agent.

[3858] Accordingly, in some embodiments, the method comprises: (a) obtaining a sample from the subject; (b) determining if the subject is susceptible to treatment with an agent capable of inhibiting or reversing EMT or a chemotherapeutic agent using a predictive method defined in accordance with the above described first and second aspects of this facet of the disclosure; and, (c) administering to the subject a therapeutically effective amount of an agent capable of inhibiting or reversing EMT or a chemotherapeutic agent.

[3859] In some embodiments the method comprises administering a therapeutically effective amount of an agent capable of inhibiting or reversing EMT or chemotherapeutic agent to a subject identified as susceptible to said treatment using a predictive method defined in accordance with the above described first and second aspects of this facet of the disclosure.

[3860] In other embodiments the method comprises: (a) administering to a subject a therapeutically effective amount of an agent capable of inhibiting or reversing EMT or a chemotherapeutic agent; and, (b) determining if the subject is susceptible to said treatment using a predictive method defined in accordance with the above described second aspect of this facet of the disclosure. In some embodiments the method further comprises: (c) administering to the subject one or more further therapeutically effective amounts of an agent capable of inhibiting or reversing EMT or a chemotherapeutic agent provided that the subject is identified as susceptible to said treatment.

[3861] A ninth aspect of this facet of the present disclosure relates to an agent capable of inhibiting or reversing EMT or chemotherapeutic agent for use in a method of treating a subject having, suspected of having, or diagnosed with non-small cell lung cancer (NSCLC). In some embodiments the method of treatment is a method as defined above.

[3862] A tenth aspect of this facet of the present disclosure relates to use of an agent capable of inhibiting or reversing EMT or chemotherapeutic agent for use in a method of manufacture of a medicament for use in a method of treating a subject having, suspected of having, or diagnosed with non-small cell lung cancer (NSCLC). In some embodiments the method of treatment is a method as defined above.

[3863] In some embodiments of these methods, agents for use, or uses, the agent capable of inhibiting or reversing EMT or chemotherapeutic agent comprises an Axl inhibitor, Akt3 inhibitor, Slfn11 inhibitor, or PHGDH inhibitor. In some preferred embodiments the agent capable of inhibiting or reversing EMT or chemotherapeutic agent is an Axl inhibitor, for example BGB324/R428/bemcentinib, cabozantinib, TP-0903, foretinib, merestinib, bosutinib, gilteritinib, crizotinib, amuvatinib, sunitinib, sitravatinib, LDC1267, or UNC2025. Other Axl inhibitors include the anti-Axl antibodies described in WO2015/193428, WO2015/193430, WO2016/097370, and WO2016/166296. In some preferred embodiments the Axl inhibitor is an anti-Axl antibody described in WO2015/193428, WO2015/193430, WO2016/097370, or WO2016/166296. In some particularly preferred embodiments the Axl inhibitor is BGB324/R428/bemcentinib.

[3864] In some other preferred embodiments, the treatment comprises an Akt3 inhibitor. In some embodiments the Akt3 inhibitor is an Akt3 inhibitor disclosed in WO2016/102672.

[3865] In some embodiments of these methods, agents for use, or uses, the treatment is administered as a single agent. In other embodiments, the treatment is administered in combination with a further cancer treatment. Suitable further cancer treatments are outlined in detail above.

[3866] In some preferred embodiments the further cancer treatment is a PD-1 inhibitor or PD-L1 inhibitor. In some embodiments the further cancer treatment is a monoclonal antibody such as pembrolizumab, alemtuzumab, bevacizumab, cetuximab, ibritumomab, tiuxetan, or rituximab. In some preferred embodiments the further cancer treatment is a microtubule polymer stabilizer such as the taxanes paclitaxel and docetaxel. In some preferred embodiments the further cancer treatment is a tyrosine kinase inhibitor such as erlotinib hydrochloride, gefitinib, imatinib mesylate, and semaxanib. In some particularly preferred embodiments the further cancer treatment is pembrolizumab. In other particularly preferred embodiments the further cancer treatment is docetaxel. In yet other particularly preferred embodiments the further cancer treatment is erlotinib.

[3867] Statements of Disclosure

[3868] The following numbered statements relate to aspects of this facet of the present disclosure, and form part of the description:
[3869] 101. A method of predicting a cancer-related outcome in a subject, the method comprising assessing the activity, expression, or amount of one or more biomarker in the subject, or in a sample derived from the subject;
   [3870] wherein the one or more biomarker is selected from the group consisting of: NT proBNP, Endostatin, IGFBP-2, VEGF-D, GDF-15, AB-40, ALP, MCP-3, SOD-1, BMP-9, IL-8, MIP-1 beta, RAGE, MPO, CgA, HE4, ADM, B2M, VDBP, Cystatin-C, Hepsin, LDH, and/or Axl; and
   [3871] wherein the subject has, is suspected of having, or has been diagnosed with non-small cell lung cancer (NSCLC).
[3872] 102. A method according to statement 101, wherein the method comprises:
   [3873] assessing the activity, expression, or amount of one or more biomarker in the subject, or in a sample derived from the subject, to obtain a sample profile of the one or more biomarker; and
   [3874] making a prediction based on the sample profile of the one or more biomarker.
[3875] 103. A method according to statement 102, wherein the prediction is made by comparing the sample profile to a control profile.
[3876] 104. A method according to statement 103, wherein the sample profile is obtained before the subject is contacted with or administered an agent capable of inhibiting or reversing EMT or a chemotherapeutic agent.
[3877] 105. A method according to statement 104, wherein the control profile is:
   [3878] (i) obtained from a population of control subjects having NSCLC; or
   [3879] (ii) obtained from a control subject or population of control subjects having NSCLC and previously found to lack susceptibility to treatment with an agent capable of inhibiting or reversing EMT or a chemotherapeutic agent (that is, non-responder subjects);
   [3880] (iii) a predetermined profile of biomarker expression, activity, or amount values, for example a profile of “average, median, or mean” values or “standard ranges” of values, obtained from a control subject or population of control subjects having NSCLC and previously found to lack susceptibility to treatment with an agent capable of inhibiting or reversing EMT or a chemotherapeutic agent (that is, non-responder subjects);
   [3881] (iv) obtained from a control sample having a known “average, median, or mean” value of biomarkers indicative of a control subject or population of control subjects having NSCLC and previously found to lack susceptibility to treatment with an agent capable of inhibiting or reversing EMT or a chemotherapeutic agent (that is, non-responder subjects);
   [3882] (v) a predetermined profile of biomarker expression, activity, or amount “threshold” values obtained from a control subject or population of control subjects having NSCLC and previously found to be susceptible to treatment with an agent capable of inhibiting or reversing EMT or a chemotherapeutic agent (that is, responder subjects); or
   [3883] (vi) obtained from a control sample having a known “threshold” value of biomarkers indicative of a control subject or population of control subjects having NSCLC and previously found to be susceptible to treatment with an agent capable of inhibiting or reversing EMT or a chemotherapeutic agent (that is, responder subjects).
[3884] 106. A method according to statement 105, wherein a higher activity, expression, or amount of one or more biomarker in the sample profile as compared with the control profile is indicative of susceptibility to treatment with an agent capable of inhibiting or reversing EMT or a chemotherapeutic agent.
[3885] 107. A method according to statement 105, wherein a lower activity, expression, or amount of one or more biomarker in the sample profile as compared with the control profile is indicative of susceptibility to treatment with an agent capable of inhibiting or reversing EMT or a chemotherapeutic agent.
[3886] 108. A method according to any one of statements 105-107, wherein the one or more biomarker includes at least one of: MCP-3, SOD-1, BMP-9, IL-8, MIP-1 beta, MPO, VDBP and/or Axl,
   [3887] and wherein a higher activity, expression, or amount of one or more of said biomarkers in the sample profile as compared with the control profile is indicative of susceptibility to treatment with an agent capable of inhibiting or reversing EMT or a chemotherapeutic agent.
[3888] 109. A method according to any one of statements 105-108, wherein the one or more biomarker includes at least one of: NT proBNP, Endostatin, IGFBP-2, VEGF-D, GDF-15, AB-40, ALP, RAGE, CgA, HE4, ADM, B2M, Cystatin-C, Hepsin, and/or LDH,
   [3889] and wherein a lower activity, expression, or amount of one or more of said biomarkers in the sample profile as compared with the control profile is indicative of susceptibility to treatment with an agent capable of inhibiting or reversing EMT or a chemotherapeutic agent.
[3890] 110. A method according to any one of statements 104-109, wherein:
   [3891] a lower activity, expression, or amount of NT proBNP and/or
   [3892] a lower activity, expression, or amount of Endostatin; and/or
   [3893] a lower activity, expression, or amount of IGFBP-2; and/or
   [3894] a lower activity, expression, or amount of VEGF-D; and/or
   [3895] a lower activity, expression, or amount of GDF-15; and/or
   [3896] a lower activity, expression, or amount of AB-40; and/or
   [3897] a lower activity, expression, or amount of ALP; and/or
   [3898] a lower activity, expression, or amount of RAGE; and/or
   [3899] a lower activity, expression, or amount of CgA; and/or
   [3900] a lower activity, expression, or amount of HE4; and/or
   [3901] a lower activity, expression, or amount of ADM; and/or
   [3902] a lower activity, expression, or amount of B2M; and/or
   [3903] a lower activity, expression, or amount of Cystatin-C; and/or
   [3904] a lower activity, expression, or amount of Hepsin; and/or
   [3905] a lower activity, expression, or amount of LDH; and/or
   [3906] a higher activity, expression, or amount of MCP-3; and/or
   [3907] a higher activity, expression, or amount of SOD-1; and/or
   [3908] a higher activity, expression, or amount of BMP-9; and/or
   [3909] a higher activity, expression, or amount of IL-8; and/or
   [3910] a higher activity, expression, or amount of MIP-1 beta, and/or
   [3911] a higher activity, expression, or amount of MPO; and/or
   [3912] a higher activity, expression, or amount of VDBP; and/or
   [3913] a higher activity, expression, or amount of Axl;
   [3914] in the sample profile as compared with the control profile is indicative of susceptibility to treatment with an agent capable of inhibiting or reversing EMT or a chemotherapeutic agent.
[3915] 111. A method according to any one of statements 101-110, wherein the one or more biomarker comprises NT proBNP,
   [3916] optionally wherein the one or more biomarker comprises at least 1, 2, 3, 4, 5, 6, 7, 8, 9, 10, or more further biomarkers selected from: Endostatin, IGFBP-2, VEGF-D, GDF-15, AB-40, ALP, MCP-3, SOD-1, BMP-9, IL-8, MIP-1 beta, RAGE, MPO, CgA, HE4, ADM, B2M, VDBP, Cystatin-C, Hepsin, LDH, and/or Axl.
[3917] 112. A method according to any one of statements 101-110, wherein the one or more biomarker comprises Endostatin,
   [3918] optionally wherein the one or more biomarker comprises at least 1, 2, 3, 4, 5, 6, 7, 8, 9, 10, or more further biomarkers selected from: NT proBNP, IGFBP-2, VEGF-D, GDF-15, AB-40, ALP, MCP-3, SOD-1, BMP-9, IL-8, MIP-1 beta, RAGE, MPO, CgA, HE4, ADM, B2M, VDBP, Cystatin-C, Hepsin, LDH, and/or Axl.
[3919] 113. A method according to any one of statements 101-110, wherein the one or more biomarker comprises IGFBP-2,
   [3920] optionally wherein the one or more biomarker comprises at least 1, 2, 3, 4, 5, 6, 7, 8, 9, 10, or more further biomarkers selected from: NT proBNP, Endostatin, VEGF-D, GDF-15, AB-40, ALP, MCP-3, SOD-1, BMP-9, IL-8, MIP-1 beta, RAGE, MPO, CgA, HE4, ADM, B2M, VDBP, Cystatin-C, Hepsin, LDH, and/or Axl.
[3921] 114. A method according to any one of statements 101-110, wherein the one or more biomarker comprises VEGF-D,
   [3922] optionally wherein the one or more biomarker comprises at least 1, 2, 3, 4, 5, 6, 7, 8, 9, 10, or more further biomarkers selected from: NT proBNP, Endostatin, IGFBP-2, GDF-15, AB-40, ALP, MCP-3, SOD-1, BMP-9, IL-8, MIP-1 beta, RAGE, MPO, CgA, HE4, ADM, B2M, VDBP, Cystatin-C, Hepsin, LDH, and/or Axl.
[3923] 115. A method according to any one of statements 101-110, wherein the one or more biomarker comprises GDF-15,
   [3924] optionally wherein the one or more biomarker comprises at least 1, 2, 3, 4, 5, 6, 7, 8, 9, 10, or more further biomarkers selected from: NT proBNP, Endostatin, IGFBP-2, VEGF-D, AB-40, ALP, MCP-3, SOD-1, BMP-9, IL-8, MIP-1 beta, RAGE, MPO, CgA, HE4, ADM, B2M, VDBP, Cystatin-C, Hepsin, LDH, and/or Axl.
[3925] 116. A method according to any one of statements 101-110, wherein the one or more biomarker comprises AB-40,
   [3926] optionally wherein the one or more biomarker comprises at least 1, 2, 3, 4, 5, 6, 7, 8, 9, 10, or more further biomarkers selected from: NT proBNP, Endostatin, IGFBP-2, VEGF-D, GDF-15, ALP, MCP-3, SOD-1, BMP-9, IL-8, MIP-1 beta, RAGE, MPO, CgA, HE4, ADM, B2M, VDBP, Cystatin-C, Hepsin, LDH, and/or Axl.
[3927] 117. A method according to any one of statements 101-110, wherein the one or more biomarker comprises ALP,
   [3928] optionally wherein the one or more biomarker comprises at least 1, 2, 3, 4, 5, 6, 7, 8, 9, 10, or more further biomarkers selected from: NT proBNP, Endostatin, IGFBP-2, VEGF-D, GDF-15, AB-40, MCP-3, SOD-1, BMP-9, IL-8, MIP-1 beta, RAGE, MPO, CgA, HE4, ADM, B2M, VDBP, Cystatin-C, Hepsin, LDH, and/or Axl.
[3929] 118. A method according to any one of statements 101-110, wherein the one or more biomarker comprises MCP-3,
   [3930] optionally wherein the one or more biomarker comprises at least 1, 2, 3, 4, 5, 6, 7, 8, 9, 10, or more further biomarkers selected from: NT proBNP, Endostatin, IGFBP-2, VEGF-D, GDF-15, AB-40, ALP, SOD-1, BMP-9, IL-8, MIP-1 beta, RAGE, MPO, CgA, HE4, ADM, B2M, VDBP, Cystatin-C, Hepsin, LDH, and/or Axl.
[3931] 119. A method according to any one of statements 101-110, wherein the one or more biomarker comprises SOD-1,
   [3932] optionally wherein the one or more biomarker comprises at least 1, 2, 3, 4, 5, 6, 7, 8, 9, 10, or more further biomarkers selected from: NT proBNP, Endostatin, IGFBP-2, VEGF-D, GDF-15, AB-40, ALP, MCP-3, BMP-9, IL-8, MIP-1 beta, RAGE, MPO, CgA, HE4, ADM, B2M, VDBP, Cystatin-C, Hepsin, LDH, and/or Axl.
[3933] 120. A method according to any one of statements 101-110, wherein the one or more biomarker comprises BMP-9,
   [3934] optionally wherein the one or more biomarker comprises at least 1, 2, 3, 4, 5, 6, 7, 8, 9, 10, or more further biomarkers selected from: NT proBNP, Endostatin, IGFBP-2, VEGF-D, GDF-15, AB-40, ALP, MCP-3, SOD-1, IL-8, MIP-1 beta, RAGE, MPO, CgA, HE4, ADM, B2M, VDBP, Cystatin-C, Hepsin, LDH, and/or Axl.
[3935] 121. A method according to any one of statements 101-110, wherein the one or more biomarker comprises IL-8,
   [3936] optionally wherein the one or more biomarker comprises at least 1, 2, 3, 4, 5, 6, 7, 8, 9, 10, or more further biomarkers selected from: NT proBNP, Endostatin, IGFBP-2, VEGF-D, GDF-15, AB-40, ALP, MCP-3, SOD-1, BMP-9, MIP-1 beta, RAGE, MPO, CgA, HE4, ADM, B2M, VDBP, Cystatin-C, Hepsin, LDH, and/or Axl.
[3937] 122. A method according to any one of statements 101-110, wherein the one or more biomarker comprises MIP-1 beta,
   [3938] optionally wherein the one or more biomarker comprises at least 1, 2, 3, 4, 5, 6, 7, 8, 9, 10, or more further biomarkers selected from: NT proBNP, Endostatin, IGFBP-2, VEGF-D, GDF-15, AB-40, ALP, MCP-3, SOD-1, BMP-9, IL-8, MIP-1 beta, RAGE, MPO, CgA, HE4, ADM, B2M, VDBP, Cystatin-C, Hepsin, LDH, and/or Axl.
[3939] 123. A method according to any one of statements 101-110, wherein the one or more biomarker comprises RAGE,
   [3940] optionally wherein the one or more biomarker comprises at least 1, 2, 3, 4, 5, 6, 7, 8, 9, 10, or more further biomarkers selected from: NT proBNP, Endostatin, IGFBP-2, VEGF-D, GDF-15, AB-40, ALP, MCP-3, SOD-1, BMP-9, IL-8, MIP-1 beta, MPO, CgA, HE4, ADM, B2M, VDBP, Cystatin-C, Hepsin, LDH, and/or Axl.
[3941] 124. A method according to any one of statements 101-110, wherein the one or more biomarker comprises MPO,
   [3942] optionally wherein the one or more biomarker comprises at least 1, 2, 3, 4, 5, 6, 7, 8, 9, 10, or more further biomarkers selected from: NT proBNP, Endostatin, IGFBP-2, VEGF-D, GDF-15, AB-40, ALP, MCP-3, SOD-1, BMP-9, IL-8, MIP-1 beta, RAGE, CgA, HE4, ADM, B2M, VDBP, Cystatin-C, Hepsin, LDH, and/or Axl.
[3943] 125. A method according to any one of statements 101-110, wherein the one or more biomarker comprises CgA,
   [3944] optionally wherein the one or more biomarker comprises at least 1, 2, 3, 4, 5, 6, 7, 8, 9, 10, or more further biomarkers selected from: NT proBNP, Endostatin, IGFBP-2, VEGF-D, GDF-15, AB-40, ALP, MCP-3, SOD-1, BMP-9, IL-8, MIP-1 beta, RAGE, MPO, HE4, ADM, B2M, VDBP, Cystatin-C, Hepsin, LDH, and/or Axl.
[3945] 126. A method according to any one of statements 101-110, wherein the one or more biomarker comprises HE4,
   [3946] optionally wherein the one or more biomarker comprises at least 1, 2, 3, 4, 5, 6, 7, 8, 9, 10, or more further biomarkers selected from: NT proBNP, Endostatin, IGFBP-2, VEGF-D, GDF-15, AB-40, ALP, MCP-3, SOD-1, BMP-9, IL-8, MIP-1 beta, RAGE, MPO, CgA, ADM, B2M, VDBP, Cystatin-C, Hepsin, LDH, and/or Axl.
[3947] 127. A method according to any one of statements 101-110, wherein the one or more biomarker comprises ADM,
   [3948] optionally wherein the one or more biomarker comprises at least 1, 2, 3, 4, 5, 6, 7, 8, 9, 10, or more further biomarkers selected from: NT proBNP, Endostatin, IGFBP-2, VEGF-D, GDF-15, AB-40, ALP, MCP-3, SOD-1, BMP-9, IL-8, MIP-1 beta, RAGE, MPO, CgA, HE4, B2M, VDBP, Cystatin-C, Hepsin, LDH, and/or Axl.
[3949] 128. A method according to any one of statements 101-110, wherein the one or more biomarker comprises B2M,
   [3950] optionally wherein the one or more biomarker comprises at least 1, 2, 3, 4, 5, 6, 7, 8, 9, 10, or more further biomarkers selected from: NT proBNP, Endostatin, IGFBP-2, VEGF-D, GDF-15, AB-40, ALP, MCP-3, SOD-1, BMP-9, IL-8, MIP-1 beta, RAGE, MPO, CgA, HE4, ADM, VDBP, Cystatin-C, Hepsin, LDH, and/or Axl.
[3951] 129. A method according to any one of statements 101-110, wherein the one or more biomarker comprises VDBP,
   [3952] optionally wherein the one or more biomarker comprises at least 1, 2, 3, 4, 5, 6, 7, 8, 9, 10, or more further biomarkers selected from: NT proBNP, Endostatin, IGFBP-2, VEGF-D, GDF-15, AB-40, ALP, MCP-3, SOD-1, BMP-9, IL-8, MIP-1 beta, RAGE, MPO, CgA, HE4, ADM, B2M, Cystatin-C, Hepsin, LDH, and/or Axl.
[3953] 130. A method according to any one of statements 101-110, wherein the one or more biomarker comprises Cystain-C,
   [3954] optionally wherein the one or more biomarker comprises at least 1, 2, 3, 4, 5, 6, 7, 8, 9, 10, or more further biomarkers selected from: NT proBNP, Endostatin, IGFBP-2, VEGF-D, GDF-15, AB-40, ALP, MCP-3, SOD-1, BMP-9, IL-8, MIP-1 beta, RAGE, MPO, CgA, HE4, ADM, B2M, VDBP, Hepsin, LDH, and/or Axl.
[3955] 131. A method according to any one of statements 101-110, wherein the one or more biomarker comprises Hepsin,
   [3956] optionally wherein the one or more biomarker comprises at least 1, 2, 3, 4, 5, 6, 7, 8, 9, 10, or more further biomarkers selected from: NT proBNP, Endostatin, IGFBP-2, VEGF-D, GDF-15, AB-40, ALP, MCP-3, SOD-1, BMP-9, IL-8, MIP-1 beta, RAGE, MPO, CgA, HE4, ADM, B2M, VDBP, Cystatin-C, LDH, and/or Axl.
[3957] 132. A method according to any one of statements 101-110, wherein the one or more biomarker comprises LDH,
   [3958] optionally wherein the one or more biomarker comprises at least 1, 2, 3, 4, 5, 6, 7, 8, 9, 10, or more further biomarkers selected from: NT proBNP, Endostatin, IGFBP-2, VEGF-D, GDF-15, AB-40, ALP, MCP-3, SOD-1, BMP-9, IL-8, MIP-1 beta, RAGE, MPO, CgA, HE4, ADM, B2M, VDBP, Cystatin-C, Hepsin, and/or Axl.
[3959] 133. A method according to any one of statements 101-110, wherein the one or more biomarker comprises Axl,
   [3960] optionally wherein the one or more biomarker comprises at least 1, 2, 3, 4, 5, 6, 7, 8, 9, 10, or more further biomarkers selected from: NT proBNP, Endostatin, IGFBP-2, VEGF-D, GDF-15, AB-40, ALP, MCP-3, SOD-1, BMP-9, IL-8, MIP-1 beta, RAGE, MPO, CgA, HE4, ADM, B2M, VDBP, Cystatin-C, Hepsin, and/or LDH.
[3961] 134. A method according to any one of statements 111-133, wherein the one or more biomarker further comprises NT proBNP.
[3962] 135. A method according to any one of statements 111-134, wherein the one or more biomarker further comprises Endostatin.
[3963] 136. A method according to any one of statements 111-135, wherein the one or more biomarker further comprises IGFBP-2.
[3964] 137. A method according to any one of statements 111-136, wherein the one or more biomarker further comprises VEGF-D.
[3965] 138. A method according to any one of statements 111-137, wherein the one or more biomarker further comprises GDF-15.
[3966] 139. A method according to any one of statements 111-138, wherein the one or more biomarker further comprises AB-40.
[3967] 140. A method according to any one of statements 111-139, wherein the one or more biomarker further comprises ALP.
[3968] 141. A method according to any one of statements 111-140, wherein the one or more biomarker further comprises MCP-3.
[3969] 142. A method according to any one of statements 111-141, wherein the one or more biomarker further comprises SOD-1.
[3970] 143. A method according to any one of statements 111-142, wherein the one or more biomarker further comprises BMP-9.
[3971] 144. A method according to any one of statements 111-143, wherein the one or more biomarker further comprises IL-8.
[3972] 145. A method according to any one of statements 111-144, wherein the one or more biomarker further comprises MIP-1 beta.
[3973] 146. A method according to any one of statements 111-145, wherein the one or more biomarker further comprises RAGE.
[3974] 147. A method according to any one of statements 111-146, wherein the one or more biomarker further comprises MPO.
[3975] 148. A method according to any one of statements 111-147, wherein the one or more biomarker further comprises CgA.
[3976] 149. A method according to any one of statements 111-148, wherein the one or more biomarker further comprises HE4.
[3977] 150. A method according to any one of statements 111-149, wherein the one or more biomarker further comprises ADM.
[3978] 151. A method according to any one of statements 111-150, wherein the one or more biomarker further comprises B2M.
[3979] 152. A method according to any one of statements 111-151, wherein the one or more biomarker further comprises VDBP.
[3980] 153. A method according to any one of statements 111-152, wherein the one or more biomarker further comprises Cystatin-C.
[3981] 154. A method according to any one of statements 111-153, wherein the one or more biomarker further comprises Hepsin.
[3982] 155. A method according to any one of statements 111-154, wherein the one or more biomarker further comprises LDH.
[3983] 156. A method according to any one of statements 111-155, wherein the one or more biomarker further comprises Axl.
[3984] 157. A method according to any one of statements 101-156, wherein:
   [3985] the Axl biomarker comprises an amino acid sequence having at least 70%, 80%, 90%, 95%, 99% or 100% sequence identity with the full-length of the amino acid sequence disclosed at UniProt accession no: P30530-1 or P30530-2 (entry version 196) or a fragment thereof;
   [3986] the N-terminal prohormone of brain natriuretic peptide (NT proBNP) biomarker comprises an amino acid sequence having at least 70%, 80%, 90%, 95%, 99% or 100% sequence identity with the full-length of the amino acid sequence disclosed at UniProt accession no: P16860-1 (entry version 186) or a fragment thereof;
   [3987] the Endostatin biomarker comprises an amino acid sequence having at least 70%, 80%, 90%, 95%, 99% or 100% sequence identity with the full-length of the amino acid sequence disclosed at UniProt accession no: P39059-1 (entry version 170) or a fragment thereof;
   [3988] the Insulin-like Growth Factor-Binding Protein 2 (IGFBP-2) biomarker comprises an amino acid sequence having at least 70%, 80%, 90%, 95%, 99% or 100% sequence identity with the full-length of the amino acid sequence disclosed at UniProt accession no: P18065-1 (entry version 193) or a fragment thereof;
   [3989] the Vascular endothelial growth factor D (VEGF-D) biomarker comprises an amino acid sequence having at least 70%, 80%, 90%, 95%, 99% or 100% sequence identity with the full-length of the amino acid sequence disclosed at UniProt accession no: 043915-1 (entry version 159) or a fragment thereof;
   [3990] the Growth/differentiation factor 15 (GDF-15) comprises an amino acid sequence having at least 70%, 80%, 90%, 95%, 99% or 100% sequence identity with the full-length of the amino acid sequence disclosed at UniProt accession no: Q99988-1 (entry version 166) or a fragment thereof;
   [3991] the Beta Amyloid 1-40 (AB-40) biomarker comprises an amino acid sequence having at least 70%, 80%, 90%, 95%, 99% or 100% sequence identity with the full-length of the amino acid sequence disclosed at UniProt accession no: P05067-1, P05067-2, P05067-3, P05067-4, P05067-5, P05067-6, P05067-7, P05067-8, P05067-9, P05067-10, or P05067-11 (entry version 271) or a fragment thereof;
   [3992] the Antileukoproteinase (ALP) biomarker comprises an amino acid sequence having at least 70%, 80%, 90%, 95%, 99% or 100% sequence identity with the full-length of the amino acid sequence disclosed at UniProt accession no: P03973 (entry version 184) or a fragment thereof;
   [3993] the Monocyte Chemotactic Protein 3 (MCP-3) comprises an amino acid sequence having at least 70%, 80%, 90%, 95%, 99% or 100% sequence identity with the full-length of the amino acid sequence disclosed at UniProt accession no: P80098-1 (entry version 169) or a fragment thereof;
   [3994] the Superoxide Dismutase 1, soluble (SOD-1) biomarker comprises an amino acid sequence having at least 70%, 80%, 90%, 95%, 99% or 100% sequence identity with the full-length of the amino acid sequence disclosed at UniProt accession no: P00441-1 (entry version 240) or a fragment thereof;
   [3995] the Bone morphogenetic protein 9 (BMP-9) biomarker comprises an amino acid sequence having at least 70%, 80%, 90%, 95%, 99% or 100% sequence identity with the full-length of the amino acid sequence disclosed at UniProt accession no: Q9UK05-1 (entry version 162) or a fragment thereof;
   [3996] the Interleukin-8 (IL-8) biomarker comprises an amino acid sequence having at least 70%, 80%, 90%, 95%, 99% or 100% sequence identity with the full-length of the amino acid sequence disclosed at UniProt accession no: P10145 (entry version 210) or a fragment thereof;
   [3997] the Macrophage Inflammatory Protein-1 beta (MIP-1 beta) biomarker comprises an amino acid sequence having at least 70%, 80%, 90%, 95%, 99% or 100% sequence identity with the full-length of the amino acid sequence disclosed at UniProt accession no: P13236 (entry version 187) or a fragment thereof;
   [3998] the Receptor for advanced glycosylation end products (RAGE) biomarker comprises an amino acid sequence having at least 70%, 80%, 90%, 95%, 99% or 100% sequence identity with the full-length of the amino acid sequence disclosed at UniProt accession no: Q15109-1, Q15109-2, Q15109-3, Q15109-4, Q15109-5, Q15109-6, Q15109-7, Q15109-8, Q15109-9, Q15109-10 (entry version 189) or a fragment thereof;
   [3999] the Myeloperoxidase (MPO) biomarker comprises an amino acid sequence having at least 70%, 80%, 90%, 95%, 99% or 100% sequence identity with the full-length of the amino acid sequence disclosed at UniProt accession no: P05164-1, P05164-2, or P05164-3 (entry version 217) or a fragment thereof;
   [4000] the Chromogranin-A (CgA) biomarker comprises an amino acid sequence having at least 70%, 80%, 90%, 95%, 99% or 100% sequence identity with the full-length of the amino acid sequence disclosed at UniProt accession no: P10645-1 (entry version 200) or a fragment thereof;
   [4001] the HE4 biomarker comprises an amino acid sequence having at least 70%, 80%, 90%, 95%, 99% or 100% sequence identity with the full-length of the amino acid sequence disclosed at UniProt accession no: Q14508-1, Q14508-2, Q14508-3, Q14508-4, or Q14508-5 (entry version 169) or a fragment thereof;
   [4002] the Adrenomedullin (ADM) biomarker comprises an amino acid sequence having at least 70%, 80%, 90%, 95%, 99% or 100% sequence identity with the full-length of the amino acid sequence disclosed at UniProt accession no: P35318-1 (entry version 174) or a fragment thereof;
   [4003] the Beta-2-Microglobulin (B2M) biomarker comprises an amino acid sequence having at least 70%, 80%, 90%, 95%, 99% or 100% sequence identity with the full-length of the amino acid sequence disclosed at UniProt accession no: P61769-1 (entry version 181) or a fragment thereof;
   [4004] the Vitamin D-Binding Protein (VDBP) biomarker comprises an amino acid sequence having at least 70%, 80%, 90%, 95%, 99% or 100% sequence identity with the full-length of the amino acid sequence disclosed at UniProt accession no: P02774-1, P02774-2, or P02774-3 (entry version 201) or a fragment thereof;
   [4005] the Cystatin-C biomarker comprises an amino acid sequence having at least 70%, 80%, 90%, 95%, 99% or 100% sequence identity with the full-length of the amino acid sequence disclosed at UniProt accession no: P01034-1 (entry version 213) or a fragment thereof;
   [4006] the Hepsin biomarker comprises an amino acid sequence having at least 70%, 80%, 90%, 95%, 99% or 100% sequence identity with the full-length of the amino acid sequence disclosed at UniProt accession no: P05981-1 (entry version 183) or a fragment thereof;
   [4007] the Lactate Dehydrogenase (LDH) biomarker comprises an amino acid sequence having at least 70%, 80%, 90%, 95%, 99% or 100% sequence identity with the full-length of the amino acid sequence disclosed at UniProt accession no: P00338-1, P00338-2, P00338-3, P00338-4, or P00338-5 (entry version 224) or a fragment thereof; and/or
   [4008] the Lactate Dehydrogenase (LDH) biomarker comprises an amino acid sequence having at least 70%, 80%, 90%, 95%, 99% or 100% sequence identity with the full-length of the amino acid sequence disclosed at UniProt accession no: P07195-1 (entry version 218) or a fragment thereof.
   [4009] or a nucleic acid (either DNA or RNA) having at least 70%, 80%, 90%, 95%, 99% or 100% sequence identity with the full-length nucleic acid sequence encoding said amino acid sequences.
[4010] 158. A method according to any one of statement 101-157, wherein the method comprises determining the amount of at least 2, 3, 4, 5, 6, 7, 8, 9, 10, 11, 12, 13, 14, 15, 20 of said biomarkers in the subject, or sample derived from the subject.
[4011] 159. A method according to any one of statements 104-158, wherein assessing the activity, expression, or amount of one or more biomarker in the subject, or in a sample derived from the subject, comprises:
   [4012] contacting a sample, or an extract from the sample, with at least 1, 2, 3, 4, 5, 6, 7, 8, 9, 10 or more reagents for detecting the activity, expression, or amount of one or more biomarkers, each of which is selective for a particular biomarker; and
   [4013] detecting and/or quantifying said reagents for detecting.
[4014] 160. A method according to statement 159, wherein assessing the expression or amount of one or more biomarker in the subject, or in a sample derived from the subject, comprises:
   [4015] contacting a sample, or an extract from the sample, with at least 1, 2, 3, 4, 5, 6, 7, 8, 9, 10 or more specific binding members, each of which selectively binds to a respective biomarker protein or mRNA; and
   [4016] detecting and/or quantifying formation of complex formed by said specific binding member and said biomarker protein or mRNA.
[4017] 161. A method according to statement 160 wherein the specific binding member comprises an antibody molecule or binding fragment thereof.
[4018] 162. A method according to statement 160 or 161, wherein detecting formation of a complex formed by the specific binding member and the biomarker protein or mRNA is carried out by use of a technique selected from: Western blot; enzyme-linked immunosorbent assay (ELISA); radioimmunoassay (RIA); competitive enzyme immunoassay; double antibody sandwich ELISA (DAS-ELISA); liquid immunoarray technology; immunocytochemistry; immunohistochemistry; antibody microarray detection; precipitation of colloidal gold; affinity chromatography; ligand binding assay; and lectin binding assay.
[4019] 163. A method according to any one of statements 160-162 wherein the expression or amount of the one or more biomarker is determined as the absolute amount of the respective biomarker protein or mRNA in the sample.
[4020] 164. A method according to any one of statements 160-162 wherein the expression or amount of the one or more biomarker is determined as a relative amount of the respective biomarker protein or mRNA in the sample,
   [4021] optionally wherein the relative amount is determined relative to a reference protein or mRNA in the sample, the expression of which is not altered by NSCLC.
[4022] 165. A method according to any one of statements 101-164, wherein the cancer-related outcome is susceptibility to treatment with an agent capable of inhibiting or reversing EMT or a chemotherapeutic agent.
[4023] 166. A method according to statement 165, wherein the agent capable of inhibiting or reversing EMT or chemotherapeutic agent is an Axl inhibitor, Akt3 inhibitor, Slfn11 inhibitor, or PHGDH inhibitor.
[4024] 167. A method according to statement 166, wherein the agent capable of inhibiting or reversing EMT or chemotherapeutic agent is an Axl inhibitor.
[4025] 168. A method according to statement 167, wherein the Axl inhibitor is BGB324/R428/bemcentinib, cabozantinib, TP-0903, foretinib, merestinib, bosutinib, gilteritinib, crizotinib, amuvatinib, sunitinib, sitravatinib, LDC1267, UNC2025, or an anti-Axl antibody described in WO2015/193428, WO2015/193430, WO2016/097370, or WO2016/166296.
[4026] 169. A method according to statement 168, wherein the Axl inhibitor is BGB324/R428/bemcentinib.
[4027] 170. A method according to statement 168, wherein the Axl inhibitor is an anti-Axl antibody described in WO2015/193428, WO2015/193430, WO2016/097370, or WO2016/166296.
[4028] 171. A method according to statement 166, wherein the agent capable of inhibiting or reversing EMT or chemotherapeutic agent is an Akt3 inhibitor.
[4029] 172. A method according to statement 171, wherein the Akt3 inhibitor is an Akt3 inhibitor disclosed in WO2016/102672.
[4030] 173. A method according to any one of statements 165-172, wherein the agent capable of inhibiting or reversing EMT is administered as a single agent.
[4031] 174. A method according to any one of statements 165-172, wherein the agent capable of inhibiting or reversing EMT is administered in combination with a further cancer treatment.
[4032] 175. A method according to statement 174, wherein the further cancer treatment is selected from:
   [4033] (i) alkylating agents, including alkyl sulfonates such as busulfan;
   [4034] (ii) nitrogen mustards such as chlorambucil, cyclophosphamide, estramustine, ifosfamide, mechlorethamine, melphalan, and uramustine;
   [4035] (iii) ethyleneimine derivatives such as thiotepa;
   [4036] (iv) nitrosoureas such as carmustine, lomustine, and streptozocin;
   [4037] (v) triazenes such as dacarbazine, procarbazine, and temozolamide;
   [4038] (vi) platinum compounds such as cisplatin, carboplatin, oxaliplatin, satraplatin, and picoplatin onnaplatin, tetraplatin, sprioplatin, iproplatin, chloro(diethylenediamino)-platinum (II) chloride, dichloro(ethylenediamino)-platinum (II), diamino(2-ethylmalonato)platinum (II), (1,2-diaminocyclohexane)malonatoplatinum (II), (4-carboxyphthalo)-(1,2-diaminocyclohexane)platinum (II), (1,2-diaminocyclohexane)-(isocitrato)platinum (II), and (1,2-diaminocyclohexane)-cis-(pyruvato)platinum (II);
   [4039] (vii) antimetabolites, including antifolates such as methotrexate, permetrexed, raltitrexed, and trimetrexate;
   [4040] (viii) pyrimidine analogues such as azacitidine, capecitabine, cytarabine, edatrexate, floxuridine, fluorouracil, gemcitabine, and troxacitabine;
   [4041] (ix) purine analogues such as cladribine, chlorodeoxyadenosine, clofarabine, fludarabine, mercaptopurine, pentostatin, and thioguanine;
   [4042] (x) natural products, including antitumor antibiotics such as bleomycin, dactinomycin, mithramycin, mitomycin, mitoxantrone, porfiromycin;
   [4043] (xi) anthracyclines such as daunorubicin, doxorubicin, epirubicin, idarubicin, and valrubicin;
   [4044] (xii) mitotic inhibitors such as the vinca alkaloids vinblastine, vinvesir, vincristine, vindesine, and vinorelbine;
   [4045] (xiii) enzymes such as L-asparaginase and PEG-L-asparaginase;
   [4046] (xiv) microtubule polymer stabilizers such as the taxanes paclitaxel and docetaxel;
   [4047] (xv) topoisomerase I inhibitors such as the camptothecins irinotecan and topotecan;
   [4048] (xvi) topoisomerase II inhibitors such as podophyllotoxin, amsacrine, etoposide, teniposide, losoxantrone and actinomycin;
   [4049] (xvii) hormones and hormone antagonists, including
      [4050] androgens such as fluoxymesterone and testolactone;
      [4051] antiandrogens such as bicalutamide, cyproterone, flutamide, and nilutamide;
      [4052] corticosteroids such as dexamethasone and prednisone;
      [4053] aromatase inhibitors such as aminoglutethimide, anastrozole, exemestane, formestane, and letrozole;
      [4054] estrogens such as diethylstilbestrol;
      [4055] antiestrogens such as fulvestrant, raloxifene, tamoxifen, and toremifine;
      [4056] luteinising hormone-releasing hormone (LHRH) agonists and antagonists such as abarelix, buserelin, goserelin, leuprolide, histrelin, desorelin, nafarelin acetate and triptorelin;
      [4057] progestins such as medroxyprogesterone acetate and megestrol acetate; and
      [4058] thyroid hormones such as levothyroxine and liothyronine;
   [4059] (xviii) PKB pathway inhibitors, including perifosine, enzastaurin hydrochloride, and triciribine;
   [4060] (xix) P13K inhibitors such as semaphore and SF1126, and MTOR inhibitors such as rapamycin and analogues;
   [4061] (xx) CDK inhibitors, including seliciclib, alvocidib, and 7-hydroxystaurosporine;
   [4062] (xxi) COX-2 inhibitors, including celecoxib;
   [4063] (xxii) HDAC inhibitiors, including trichostatin A, suberoylanilide hydroxamic acid, and chlamydocin;
   [4064] (xxiii) DNA methylase inhibitors, including temozolomide, and miscellaneous agents, including altretamine, arsenic trioxide, thalidomide, lenalidomide, gallium nitrate, levamisole, mitotane, hydroxyurea, octreotide, procarbazine, suramin, photodynamic compounds such as methoxsalen and sodium porfimer;
   [4065] (xxiv) proteasome inhibitors such as bortezomib;
   [4066] (xxv) molecular targeted therapy agents including: functional therapeutic agents, including gene therapy agents and antisense therapy agents;
   [4067] (xxvi) tyrosine kinase inhibitors such as erlotinib hydrochloride, gefitinib, imatinib mesylate, and semaxanib;
   [4068] (xxvii) Raf inhibitors such as sorafenib, and gene expression modulators such as the retinoids and rexinoids, for example adapalene, bexarotene, trans-retinoic acid, 9-cis-retinoic acid, and N-(4-hydroxyphenyl)retinamide;
   [4069] (xxviii) phenotype-directed therapy agents, including monoclonal antibodies such as pembrolizumab, alemtuzumab, bevacizumab, cetuximab, ibritumomab tiuxetan, rituximab, and trastuzumab, immunotoxins such as gemtuzumab ozogamicin, radioimmunoconjugates such as I-tositumobab;
   [4070] (xxix) cancer vaccines;
   [4071] (xxx) biologic therapy agents including: interferons such as interferon-[alpha]2a and interferon-[alpha]2b, and interleukins such as aldesleukin, denileukin diftitox, and oprelvekin;
   [4072] (xxxi) anticancer therapies involving the use of protective or adjunctive agents, including: cytoprotective agents such as amifostine, and dexrazoxane, phosphonates such as pamidronate and zoledronic acid, and stimulating factors such as epoetin, darbeopetin, filgrastim, PEG-filgrastim, and sargramostim;
   [4073] (xxxii) Axl inhibitors such as 1-(6,7-dihydro-5H-benzo[6,7]cyclohepta[1,2-c]pyridazin-3-yl)-N3-((7-(S)-pyrrolidin-1-yl)-6,7,8,9-tetrahydro-5H-benzo[7]annulene-2-yl)-1H-1,2,4-triazole-3,5-diamine; and/or
   [4074] (xxxiii) further combination chemotherapeutic regimens, such as combinations of carboplatin/paclitaxel, capecitabine/docetaxel, fluorauracil/levamisole, fluorauracil/leucovorin, methotrexate/leucovorin, and trastuzumab/paclitaxel, alone or in further combination with carboplatin.
[4075] 176. A method according to statement 129, wherein the further cancer treatment is:
   [4076] (i) a PD-1 inhibitor or PD-L1 inhibitor;
   [4077] (ii) a monoclonal antibody such as pembrolizumab, alemtuzumab, bevacizumab, cetuximab, ibritumomab, tiuxetan, or rituximab;
   [4078] (iii) a microtubule polymer stabilizer such as the taxanes paclitaxel and docetaxel; and/or
   [4079] (iv) a tyrosine kinase inhibitor such as erlotinib hydrochloride, gefitinib, imatinib mesylate, and semaxanib.
[4080] 177. A method according to statement 176, wherein the further cancer treatment is pembrolizumab.
[4081] 178. A method according to statement 176, wherein the further cancer treatment is docetaxel.
[4082] 179. A method according to statement 176, wherein the further cancer treatment is erlotinib.
[4083] 180. A method according to any one of statements 101-179, wherein the subject is mammalian, optionally wherein the subject is human.
[4084] 181. A method according to any one of statements 101-180, wherein the predictive method is performed before the subject receives a treatment or course of treatment for NSCLC.
[4085] 182. A method according to any one of statement 101-181, wherein the predictive method is performed during or after a treatment or course of treatment for NSCLC.
[4086] 183. A method according to any one of statements 101-180 or 182, wherein the subject has previously been treated with an agent capable of inhibiting or reversing EMT or a chemotherapeutic agent.
[4087] 184. A method according to statement 183, wherein the subject has previously been treated with an agent selected from: a PHGDH inhibitor, a Slfn11 inhibitor, an Axl inhibitor, or an Akt3 inhibitor.
[4088] 185. A method according to any one of statements 183-184, wherein the subject has previously been treated with an agent that is different to the agent capable of inhibiting or reversing EMT or chemotherapeutic agent for which the subject's susceptibility is being predicted.
[4089] 186. A method according to any one of statements 101-181, wherein the subject has not previously been treated with an agent capable of inhibiting or reversing EMT or a chemotherapeutic agent.
[4090] 187. A method according to statement 186, wherein the subject has not previously been treated with an Axl inhibitor.
[4091] 188. A method according to statement 186, wherein the subject has not previously been treated with an Akt3 inhibitor.
[4092] 189. A method according to any one of statements 101-188, wherein the sample is selected from: blood, serum, plasma, tissue biopsy, culture supernatant, or urine.
[4093] 190. A method according to statement 189, wherein the sample is a blood, serum, or plasma sample.
[4094] 191. A method according to statement 190, wherein the sample is a serum sample.
[4095] 192. A method according to any one of statements 104-191, wherein the method further comprises a subsequent step of assessing the activity, expression, or amount of one or more biomarker in the subject, in which a sample profile is obtained after contacting the subject with an agent capable of inhibiting or reversing EMT or a chemotherapeutic agent.
[4096] 193. A method according to statement 103, wherein the sample profile is obtained after contacting the subject with an agent capable of inhibiting or reversing EMT or a chemotherapeutic agent.
[4097] 194. A method according to statement 192 or 193, wherein the control profile is obtained from the same subject prior to contacting said subject with the agent capable of inhibiting or reversing EMT or a chemotherapeutic agent.
[4098] 195. A method according to statement 194, wherein an increase in the activity, expression, or amount of one or more biomarker in the sample profile as compared with the control profile is indicative of higher susceptibility to treatment with an agent capable of inhibiting or reversing EMT or a chemotherapeutic agent.
[4099] 196. A method according to statement 194, wherein a decrease in the activity, expression, or amount of one or more biomarker in the sample profile as compared with the control profile is indicative of higher susceptibility to treatment with an agent capable of inhibiting or reversing EMT or a chemotherapeutic agent.
[4100] 197. A method according to statement 194, wherein an increase in the activity, expression, or amount of one or more biomarker in the sample profile as compared with the control profile is indicative of lower susceptibility to treatment with an agent capable of inhibiting or reversing EMT or a chemotherapeutic agent.
[4101] 198. A method according to statement 194, wherein a decrease in the activity, expression, or amount of one or more biomarker in the sample profile as compared with the control profile is indicative of lower susceptibility to treatment with an agent capable of inhibiting or reversing EMT or a chemotherapeutic agent.
[4102] 199. A method according to statement 195, wherein the one or more biomarker includes at least Axl.
[4103] 200. A method according to statement 195, wherein the one or more biomarker includes at least NT proBNP.
[4104] 201. A method according to statement 195, wherein the one or more biomarker includes at least Endostatin.
[4105] 202. A method according to statement 195, wherein the one or more biomarker includes at least IGFBP-2.
[4106] 203. A method according to statement 195, wherein the one or more biomarker includes at least VEGF-D.
[4107] 204. A method according to statement 195, wherein the one or more biomarker includes at least GDF-15.
[4108] 205. A method according to statement 195, wherein the one or more biomarker includes at least AB-40.
[4109] 206. A method according to statement 195, wherein the one or more biomarker includes at least ALP.
[4110] 207. A method according to statement 195, wherein the one or more biomarker includes at least MCP-3.
[4111] 208. A method according to statement 195, wherein the one or more biomarker includes at least SOD-1.
[4112] 209. A method according to statement 195, wherein the one or more biomarker includes at least BMP-9.
[4113] 210. A method according to statement 195, wherein the one or more biomarker includes at least IL-8.
[4114] 211. A method according to statement 195, wherein the one or more biomarker includes at least MIP-1 beta.
[4115] 212. A method according to statement 195, wherein the one or more biomarker includes at least RAGE
[4116] 213. A method according to statement 195, wherein the one or more biomarker includes at least MPO.
[4117] 214. A method according to statement 195, wherein the one or more biomarker includes at least CgA.
[4118] 215. A method according to statement 195, wherein the one or more biomarker includes at least HE4.
[4119] 216. A method according to statement 195, wherein the one or more biomarker includes at least ADM.
[4120] 217. A method according to statement 195, wherein the one or more biomarker includes at least B2M.
[4121] 218. A method according to statement 195, wherein the one or more biomarker includes at least VDBP.
[4122] 219. A method according to statement 195, wherein the one or more biomarker includes at least Cystatin-C.
[4123] 220. A method according to statement 195, wherein the one or more biomarker includes at least Hepsin.
[4124] 221. A method according to statement 195, wherein the one or more biomarker includes at least LDH.
[4125] 222. A method according to any one of statements 192-221, wherein assessing the activity, expression, or amount of one or more biomarker in the subject, or in a sample derived from the subject, comprises:
   [4126] contacting a sample, or an extract from the sample, with at least 1, 2, 3, 4, 5, 6, 7, 8, 9, 10 or more reagents for detecting the activity, expression, or amount of one or more biomarkers, each of which is selective for a particular biomarker; and
   [4127] detecting and/or quantifying said reagents for detecting.
[4128] 223. A method according to statement 222, wherein assessing the expression or amount of one or more biomarker in the subject, or in a sample derived from the subject, comprises:
   [4129] contacting a sample, or an extract from the sample, with at least 1, 2, 3, 4, 5, 6, 7, 8, 9, 10 or more specific binding members, each of which selectively binds to a respective biomarker protein or mRNA; and
   [4130] detecting and/or quantifying formation of a complex formed by said specific binding member and said biomarker protein or mRNA.
[4131] 224. A method according to statement 223, wherein the specific binding member comprises an antibody molecule or binding fragment thereof.
[4132] 225. A method according to statement 223 or 224, wherein detecting formation of a complex formed by the specific binding member and the biomarker protein or mRNA is carried out by use of a technique selected from: Western blot; enzyme-linked immunosorbent assay (ELISA); radioimmunoassay (RIA); competitive enzyme immunoassay; double antibody sandwich ELISA (DAS-ELISA); liquid immunoarray technology; immunocytochemistry; immunohistochemistry; antibody microarray detection; precipitation of colloidal gold; affinity chromatography; ligand binding assay; and lectin binding assay.
[4133] 226. A method according to any one of statements 223-225 wherein the expression or amount of the one or more biomarker is determined as the absolute amount of the respective biomarker protein or mRNA in the sample.
[4134] 227. A method according to any one of statements 223-225 wherein the expression or amount of the one or more biomarker is determined as a relative amount of the respective biomarker protein or mRNA in the sample,
   [4135] optionally wherein the relative amount is determined relative to a reference protein or mRNA in the sample, the expression of which is not altered by NSCLC.
[4136] 228. A method according to any one of statements 196-227, wherein the agent capable of inhibiting or reversing EMT or chemotherapeutic agent is an Axl inhibitor, Akt3 inhibitor, Slfn11 inhibitor, or PHGDH inhibitor.
[4137] 229. A method according to statement 228, wherein the agent capable of inhibiting or reversing EMT or chemotherapeutic agent is an Axl inhibitor.
[4138] 230. A method according to statement 229, wherein the Axl inhibitor is BGB324/R428/bemcentinib, cabozantinib, TP-0903, foretinib, merestinib, bosutinib, gilteritinib, crizotinib, amuvatinib, sunitinib, sitravatinib, LDC1267, UNC2025, or an anti-Axl antibody described in WO2015/193428, WO2015/193430, WO2016/097370, or WO2016/166296.
[4139] 231. A method according to statement 230, wherein the Axl inhibitor is BGB324/R428/bemcentinib.
[4140] 232. A method according to statement 230, wherein the Axl inhibitor is an anti-Axl antibody described in WO2015/193428, WO2015/193430, WO2016/097370, or WO2016/166296.
[4141] 233. A method according to statement 228, wherein the agent capable of inhibiting or reversing EMT or chemotherapeutic agent is an Akt3 inhibitor.
[4142] 234. A method according to statement 233, wherein the Akt3 inhibitor is an Akt3 inhibitor disclosed in WO2016/102672.
[4143] 235. A method according to any one of statements 228-234, wherein the agent capable of inhibiting or reversing EMT is administered as a single agent.
[4144] 236. A method according to any one of statements 228-234, wherein the agent capable of inhibiting or reversing EMT is administered in combination with a further cancer treatment.
[4145] 237. A method according to statement 236, wherein the further cancer treatment is selected from the further cancer treatments listed in statement 175.
[4146] 238. A method according to statement 236, wherein the further cancer treatment is:
   [4147] (i) a PD-1 inhibitor or PD-L1 inhibitor;
   [4148] (ii) a monoclonal antibody such as pembrolizumab, alemtuzumab, bevacizumab, cetuximab, ibritumomab, tiuxetan, or rituximab;
   [4149] (iii) a microtubule polymer stabilizer such as the taxanes paclitaxel and docetaxel; and/or
   [4150] (iv) a tyrosine kinase inhibitor such as erlotinib hydrochloride, gefitinib, imatinib mesylate, and semaxanib.
[4151] 239. A method according to statement 238, wherein the further cancer treatment is pembrolizumab.
[4152] 240. A method according to statement 238, wherein the further cancer treatment is docetaxel.
[4153] 241. A method according to statement 238, wherein the further cancer treatment is erlotinib.
[4154] 242. A method according to any one of statements 193-241, wherein the subject is mammalian, optionally wherein the subject is human.
[4155] 243. A method according to any one of statements 193-242, wherein the subject was selected for treatment with the agent capable of inhibiting or reversing EMT or a chemotherapeutic agent, using a predictive method according to any one of statements 101-192.
[4156] 244. A method according to any one of statements 193-243, wherein the sample is selected from: blood, serum, plasma, tissue biopsy, culture supernatant, or urine.
[4157] 245. A method according to statement 244, wherein the sample is a blood, serum, or plasma sample.
[4158] 246. A method according to statement 245, wherein the sample is a serum sample.
[4159] 247. A method according to any one of statements 1-246, wherein the method is performed in vitro or ex vivo.
[4160] 201a. A method of selecting subjects having, suspected of having, or diagnosed with non-small cell lung cancer (NSCLC) for treatment with an agent capable of inhibiting or reversing EMT or a chemotherapeutic agent, the method comprising:
   [4161] identifying subjects susceptible to treatment with an agent capable of inhibiting or reversing EMT or a chemotherapeutic agent using a method according to any one of statements 101-247; and
   [4162] selecting thus identified subjects for treatment.
[4163] 202a. A method of selecting subjects having, suspected of having, or diagnosed with non-small cell lung cancer (NSCLC) for continued treatment with an agent capable of inhibiting or reversing EMT or a chemotherapeutic agent, the method comprising:
   [4164] identifying subjects susceptible to treatment with an agent capable of inhibiting or reversing EMT or a chemotherapeutic agent using a method according to any one of statements 193-247; and
   [4165] selecting thus identified subjects for treatment.
[4166] 203a. A method according to any one of statements 201a-202a, wherein treatment comprises administering to the subject a therapeutically effective amount of an agent capable of inhibiting or reversing EMT or a chemotherapeutic agent.
[4167] 204a. A method according to statement 203a, wherein the treatment comprises an Axl inhibitor, Akt3 inhibitor, Slfn11 inhibitor, or PHGDH inhibitor.
[4168] 205a. A method according to statement 204a, wherein the treatment comprises an Axl inhibitor.
[4169] 206a. A method according to statement 205a, wherein the Axl inhibitor is BGB324/R428/bemcentinib, cabozantinib, TP-0903, foretinib, merestinib, bosutinib, gilteritinib, crizotinib, amuvatinib, sunitinib, sitravatinib, LDC1267, UNC2025, or an anti-Axl antibody described in WO2015/193428, WO2015/193430, WO2016/097370, or WO2016/166296.
[4170] 207a. A method according to statement 206a, wherein the Axl inhibitor is BGB324/R428/bemcentinib.
[4171] 208a. A method according to statement 206a, wherein the Axl inhibitor is an anti-Axl antibody described in WO2015/193428, WO2015/193430, WO2016/097370, or WO2016/166296.
[4172] 209a. A method according to statement 204a, wherein the treatment comprises an Akt3 inhibitor.
[4173] 210a. A method according to statement 209a, wherein the Akt3 inhibitor is an Akt3 inhibitor disclosed in WO2016/102672.
[4174] 211a. A method according to any one of statements 203a-210a, wherein the treatment is administered as a single agent.
[4175] 212a. A method according to any one of statements 203a-211a, wherein the treatment is administered in combination with a further cancer treatment.
[4176] 213a. A method according to statement 212a, wherein the further cancer treatment is selected from the further cancer treatments listed in statement 175.
[4177] 214a. A method according to statement 212a, wherein the further cancer treatment is:
   [4178] (i) a PD-1 inhibitor or PD-L1 inhibitor;
   [4179] (ii) a monoclonal antibody such as pembrolizumab, alemtuzumab, bevacizumab, cetuximab, ibritumomab, tiuxetan, or rituximab;
   [4180] (iii) a microtubule polymer stabilizer such as the taxanes paclitaxel and docetaxel; and/or
   [4181] (iv) a tyrosine kinase inhibitor such as erlotinib hydrochloride, gefitinib, imatinib mesylate, and semaxanib.
[4182] 215a. A method according to statement 214a, wherein the further cancer treatment is pembrolizumab.
[4183] 216a. A method according to statement 214a, wherein the further cancer treatment is docetaxel.
[4184] 217a. A method according to statement 214a, wherein the further cancer treatment is erlotinib.
[4185] 301. A diagnostic kit comprising 1, 2, 3, 4, 5, 6, 7, 8, 9, 10 or more reagents for detecting the activity, expression, or amount of one or more biomarkers, each of which is selective for a particular biomarker selected from the group consisting of: NT proBNP, Endostatin, IGFBP-2, VEGF-D, GDF-15, AB-40, ALP, MCP-3, SOD-1, BMP-9, IL-8, MIP-1 beta, RAGE, MPO, CgA, HE4, ADM, B2M, VDBP, Cystatin-C, Hepsin, LDH, and/or Axl.
[4186] 302. A test device comprising 1, 2, 3, 4, 5, 6, 7, 8, 9, 10 or more reagents for detecting the activity, expression, or amount of one or more biomarkers, each of which is selective for a particular biomarker selected from the group consisting of: NT proBNP, Endostatin, IGFBP-2, VEGF-D, GDF-15, AB-40, ALP, MCP-3, SOD-1, BMP-9, IL-8, MIP-1 beta, RAGE, MPO, CgA, HE4, ADM, B2M, VDBP, Cystatin-C, Hepsin, LDH, and/or Axl.
[4187] 303. A diagnostic kit or test device according to any one of statements 301 or 302, comprising:
   [4188] 1, 2, 3, 4, 5, 6, 7, 8, 9, 10 or more specific binding members, each of which selectively binds to a biomarker selected from the group consisting of: NT proBNP, Endostatin, IGFBP-2, VEGF-D, GDF-15, AB-40, ALP, MCP-3, SOD-1, BMP-9, IL-8, MIP-1 beta, RAGE, MPO, CgA, HE4, ADM, B2M, VDBP, Cystatin-C, Hepsin, LDH, and/or Axl; and
   [4189] one or more reagents for detecting said one or more specific binding members or one or more reagents for detecting and/or quantifying formation of a complex formed by said specific binding member and said biomarker.
[4190] 304. A diagnostic kit or test device according to statement 303, wherein the specific binding member comprises an antibody molecule or binding fragment thereof.
[4191] 305. A diagnostic kit or test device according to any of statements 303-304, wherein detecting formation of a complex formed by the specific binding member and the biomarker is carried out by use of a technique selected from: Western blot; enzyme-linked immunosorbent assay (ELISA); radioimmunoassay (RIA); competitive enzyme immunoassay; double antibody sandwich ELISA (DAS-ELISA); liquid immunoarray technology; immunocytochemistry; immunohistochemistry; antibody microarray detection; precipitation of colloidal gold; affinity chromatography; ligand binding assay; and lectin binding assay.
[4192] 306. A diagnostic kit or test device according to any one of statements 301-305, wherein the kit or test device comprises no more than 15, 20, 25, 30, 40, or 50 reagents for detecting.
[4193] 307. A diagnostic kit or test device according to any one of statements 301-306 for use in a method of predicting a cancer-related outcome in a subject.
[4194] 308. A diagnostic kit for use, or test device for use, according to statement 307, wherein the cancer-related outcome is susceptibility to treatment with an agent capable of inhibiting or reversing EMT or a chemotherapeutic agent.
[4195] 309. A diagnostic kit for use, or test device for use, according to statement 308, wherein the agent capable of inhibiting or reversing EMT or chemotherapeutic agent is an Axl inhibitor, Akt3 inhibitor, Slfn11 inhibitor, or PHGDH inhibitor.
[4196] 310. A diagnostic kit for use, or test device for use, according to statement 308, wherein the agent capable of inhibiting or reversing EMT or chemotherapeutic agent is an Axl inhibitor.
[4197] 311. A diagnostic kit for use, or test device for use, according to statement 310, wherein the Axl inhibitor is BGB324/R428/bemcentinib, cabozantinib, TP-0903, foretinib, merestinib, bosutinib, gilteritinib, crizotinib, amuvatinib, sunitinib, sitravatinib, LDC1267, UNC2025, or an anti-Axl antibody described in WO2015/193428, WO2015/193430, WO2016/097370, or WO2016/166296.
[4198] 312. A diagnostic kit for use, or test device for use, according to statement 311, wherein the Axl inhibitor is BGB324/R428/bemcentinib.
[4199] 313. A diagnostic kit for use, or test device for use, according to statement 311, wherein the Axl inhibitor is an anti-Axl antibody described in WO2015/193428, WO2015/193430, WO2016/097370, or WO2016/166296.
[4200] 314. A diagnostic kit for use, or test device for use, according to statement 308, wherein the agent capable of inhibiting or reversing EMT or chemotherapeutic agent is an Akt3 inhibitor.
[4201] 315. A diagnostic kit for use, or test device for use, according to any one of statements 307-310, wherein the subject has, is suspected of having, or has been diagnosed with non-small cell lung cancer (NSCLC).
[4202] 316. A diagnostic kit for use, or test device for use, according to any one of statements 307-315, wherein the method is a method according to any one of statements 101-247.
[4203] 317. Use of a reagent for detecting the activity, expression, or amount of a biomarker selected from the group consisting of: NT proBNP, Endostatin, IGFBP-2, VEGF-D, GDF-15, AB-40, ALP, MCP-3, SOD-1, BMP-9, IL-8, MIP-1 beta, RAGE, MPO, CgA, HE4, ADM, B2M, VDBP, Cystatin-C, Hepsin, LDH, and/or Axl, in a method of predicting a cancer-related outcome in a subject.
[4204] 318. Use of 1, 2, 3, 4, 5, 6, 7, 8, 9, 10 or more reagents for detecting the activity, expression, or amount a biomarker, each of which is selective for a particular biomarker selected from the group consisting of: NT proBNP, Endostatin, IGFBP-2, VEGF-D, GDF-15, AB-40, ALP, MCP-3, SOD-1, BMP-9, IL-8, MIP-1 beta, RAGE, MPO, CgA, HE4, ADM, B2M, VDBP, Cystatin-C, Hepsin, LDH, and/or Axl, in a method of manufacture of a diagnostic kit or test device for use in a method of predicting a cancer-related outcome in a subject.
[4205] 319. A use according to any one of statements 317-318, wherein the reagent for detecting comprises a specific binding member selective for a particular biomarker.
[4206] 320. A use according to any one of statement 317-319, wherein the method of predicting a cancer-related outcome in a subject is a method according to any one of statements 101-247.
[4207] 401. Use of one or more of: NT proBNP, Endostatin, IGFBP-2, VEGF-D, GDF-15, AB-40, ALP, MCP-3, SOD-1, BMP-9, IL-8, MIP-1 beta, RAGE, MPO, CgA, HE4, ADM, B2M, VDBP, Cystatin-C, Hepsin, LDH, and/or Axl, as a biomarker for determining if a subject is susceptible to treatment with an agent capable of inhibiting or reversing EMT or a chemotherapeutic agent.
[4208] 402. A use according to statement 401, wherein:
   [4209] (i) a higher activity, expression, or amount of one or more of said biomarkers in the subject, or sample derived from the subject, compared with a control profile for the respective biomarker is indicative of susceptibility to treatment with an agent capable of inhibiting or reversing EMT or a chemotherapeutic agent; or
   [4210] (ii) a lower activity, expression, or amount of one or more of said biomarkers in the subject, or sample derived from the subject, compared with a control profile for the respective biomarker is indicative of susceptibility to treatment with an agent capable of inhibiting or reversing EMT or a chemotherapeutic agent.
[4211] 403. A use according to statement 401, wherein:
   [4212] (i) an increase in the activity, expression, or amount of one or more biomarker relative to a control profile for the respective biomarker after contacting the subject with a cancer therapeutic agent is indicative of increased susceptibility to treatment with an agent capable of inhibiting or reversing EMT or a chemotherapeutic agent; or
   [4213] (ii) a decrease in the activity, expression, or amount of one or more biomarker relative to a control profile for the respective biomarker after contacting the subject with a cancer therapeutic agent is indicative of increased susceptibility to treatment with an agent capable of inhibiting or reversing EMT or a chemotherapeutic agent.
[4214] 404. A use according to any one of statements 401-403, wherein the use is as a biomarker in a method according to any one of statements 101-247
[4215] 501. A method of treating a subject having, suspected of having, or diagnosed with non-small cell lung cancer (NSCLC), the method comprising:
   [4216] identifying a subject susceptible to treatment using a method according to any one of statements 101-247; and
   [4217] administering to the subject a therapeutically effective amount of an agent capable of inhibiting or reversing EMT or a chemotherapeutic agent.
[4218] 502. A method of treating a subject having, suspected of having, or diagnosed with non-small cell lung cancer (NSCLC), the method comprising:
   [4219] (a) obtaining a sample from the subject;
   [4220] (b) determining if the subject is susceptible to treatment with an agent capable of inhibiting or reversing EMT or a chemotherapeutic agent using a method according to any one of statements 101-247;
   [4221] (c) administering to the subject a therapeutically effective amount of an agent capable of inhibiting or reversing EMT or a chemotherapeutic agent.
[4222] 503. A method of treating a subject having, suspected of having, or diagnosed with non-small cell lung cancer (NSCLC), the method comprising administering a therapeutically effective amount of an agent capable of inhibiting or reversing EMT or chemotherapeutic agent to a subject identified as susceptible to said treatment using a method according to any one of statements 101-247.
[4223] 504. A method of treating a subject having, suspected of having, or diagnosed with non-small cell lung cancer (NSCLC), the method comprising:
   [4224] administering to the subject a therapeutically effective amount of an agent capable of inhibiting or reversing EMT or a chemotherapeutic agent; and
   [4225] determining if the subject is susceptible to said treatment using a method according to any one of statements 193-247.
[4226] 505. A method according to statement 504, wherein the method comprises administering to the subject one or more further therapeutically effective amounts of an agent capable of inhibiting or reversing EMT or a chemotherapeutic agent provided that the subject is identified as susceptible to said treatment.
[4227] 506. An agent capable of inhibiting or reversing EMT or chemotherapeutic agent for use in a method of treating a subject having, suspected of having, or diagnosed with non-small cell lung cancer (NSCLC),
   [4228] wherein the method is a method according to any one of statements 501-505.
[4229] 507. Use of an agent capable of inhibiting or reversing EMT or chemotherapeutic agent for use in a method of manufacture of a medicament for use in a method of treating a subject having, suspected of having, or diagnosed with non-small cell lung cancer (NSCLC),
   [4230] wherein the method of treatment is a method according to any one of statements 501-505.
[4231] 508. A method, agent for use, or use according to any one of statements 501-507, wherein the agent capable of inhibiting or reversing EMT or chemotherapeutic agent comprises an Axl inhibitor, Akt3 inhibitor, Slfn11 inhibitor, or PHGDH inhibitor.
[4232] 509. A method, agent for use, or use according to statement 508, wherein the agent capable of inhibiting or reversing EMT or chemotherapeutic agent comprises an Axl inhibitor.
[4233] 510. A method, agent for use, or use according to statement 509, wherein the Axl inhibitor is BGB324/R428/bemcentinib, cabozantinib, TP-0903, foretinib, merestinib, bosutinib, gilteritinib, crizotinib, amuvatinib, sunitinib, sitravatinib, LDC1267, UNC2025, or an anti-Axl antibody described in WO2015/193428, WO2015/193430, WO2016/097370, or WO2016/166296.
[4234] 511. A method, agent for use, or use according to statement 510, wherein the Axl inhibitor is BGB324/R428/bemcentinib.
[4235] 512. A method, agent for use, or use according to statement 510, wherein the Axl inhibitor is an anti-Axl antibody described in WO2015/193428, WO2015/193430, WO2016/097370, or WO2016/166296.
[4236] 512. A method, agent for use, or use according to statement 508, wherein the agent capable of inhibiting or reversing EMT or chemotherapeutic agent comprises an Akt3 inhibitor.
[4237] 513. A method, agent for use, or use according to statement 512, wherein the Akt3 inhibitor is an Akt3 inhibitor disclosed in WO2016/102672.
[4238] 514. A method, agent for use, or use according to any one of statements 501-513, wherein the agent capable of inhibiting or reversing EMT or chemotherapeutic agent is administered as a single agent.
[4239] 515. A method, agent for use, or use according to any one of statements 501-513, wherein the agent capable of inhibiting or reversing EMT or chemotherapeutic agent is administered in combination with a further cancer treatment.
[4240] 516. A method, agent for use, or use according to statement 515, wherein the further cancer treatment is selected from the further cancer treatments listed in statement 175.
[4241] 517. A method, agent for use, or use according to statement 515, wherein the further cancer treatment is:
   [4242] (i) a PD-1 inhibitor or PD-L1 inhibitor;
   [4243] (ii) a monoclonal antibody such as pembrolizumab, alemtuzumab, bevacizumab, cetuximab, ibritumomab, tiuxetan, or rituximab;
   [4244] (iii) a microtubule polymer stabilizer such as the taxanes paclitaxel and docetaxel; and/or
   [4245] (iv) a tyrosine kinase inhibitor such as erlotinib hydrochloride, gefitinib, imatinib mesylate, and semaxanib.
[4246] 518. A method, agent for use, or use according to statement 517, wherein the further cancer treatment is pembrolizumab.
[4247] 519. A method, agent for use, or use according to statement 517, wherein the further cancer treatment is docetaxel.
[4248] 520. A method, agent for use, or use according to statement 517, wherein the further cancer treatment is erlotinib.

[4249] Facet 7: Lactate Dehydrogenase (LDH)

[4250] Melanoma, also known as malignant melanoma, is a class of cancer that develops from melanocytes. These cancers typically occur in the skin, but can also occur in the mouth, intestines, or eye. Chemotherapeutic drug therapies for melanoma include, for example ipilimumab, pembrolizumab, and nivolumab. The overall success rate of such treatments in metastatic melanoma remains limited, and there remains a need for targeted therapies for this cancer type (Hsueh et al, 2016).

[4251] Non-small cell lung cancers (NSCLC) are any type of epithelial lung cancer other than small cell lung carcinoma (SCLC), and make up the majority of all lung cancers. Non-small cell lung carcinomas are grouped together because their prognosis and management are similar—the three main histologic classes are: squamous cell lung carcinoma, adenocarcinoma, and large cell lung carcinoma. Adenocarcinoma is the most common histologic type of lung carcinoma. Non-small cell lung cancers are often treated with cisplatin or carboplatin, in combination with gemcitabine, paclitaxel, docetaxel, etoposide or vinorelbine. There remains a need for targeted therapies for NSCLC (Herbst et al, 2018; Zappa et al, 2016).

[4252] Accordingly, robust biomarkers for predicting cancer-related outcomes in a subject having melanoma or NSCLC, for example susceptibility to treatment with an agent capable of inhibiting or reversing EMT or a chemotherapeutic agent, would be useful in identifying subjects who are most likely to respond to or benefit from treatment with a particular agent/regimen.

[4253] A “responder” subject as described herein is a subject who is likely to, or who does, respond to treatment (or benefit from treatment) with an agent capable of inhibiting or reversing EMT or a chemotherapeutic agent, for example the small molecule Axl kinase inhibitor BGB324/R428/bemcentinib when administered either as a single agent or in combination with another cancer treatment.

[4254] Correspondingly, a “non-responder” subject as described herein is a subject who is not likely to, or who does not, respond to treatment (or benefit from treatment) with an agent capable of inhibiting or reversing EMT or a chemotherapeutic agent, for example the small molecule Axl kinase inhibitor BGB324/R428/bemcentinib when administered either as a single agent or in combination with another cancer treatment.

[4255] To “respond to treatment” or “benefit from treatment” as used herein means to experience an overall clinical benefit from the treatment. This overall clinical benefit can be any of: prolonged survival, partial or complete disease remission, slowing or absence of disease progression, tumour shrinkage (for example, a reduction in tumour volume of 5, 10, 20, 30, 40% or more), reduction in tumour burden (for example, a reduction in tumour burden of 5, 10, 20, 30, 40% or more), slowing or absence of tumour enlargement, slowing or absence of increase in tumour burden, improved quality of life, progression-free survival, overall survival, or any other positive patient outcome. Suitable methods for determining tumour volume/burden are well known to the skilled person, for example, using: computed tomography (CT), or magnetic resonance imaging (MRI) imaging technologies; X-ray imaging, for example, mammography; ultrasound imaging; nuclear imaging, for example positron emission tomography (PET), PET/CT scans, bone scans, gallium scans, or metaiodobenzylguanidine (MIBG) scans; bioluminescence imaging (BLI); fluorescence imaging (FLI); BD ToF (infrared-based 3D Time-of-Flight camera) imaging.

[4256] Biomarkers

[4257] The term “marker” or “biomarker” is used herein to refer to a gene or protein whose expression in a subject or sample derived from a subject is altered or modulated, for example, up or down regulated, in cancer. Where the biomarker is a protein, modulation or alteration of expression encompasses modulation through different post-translational modifications.

[4258] In accordance with any aspect of this facet of the present disclosure the biomarkers described herein may be defined as follows, wherein:
[4259] a Lactate Dehydrogenase (LDH) biomarker comprises an amino acid sequence having at least 70%, 80%, 90%, 95%, 99% or 100% sequence identity with the full-length of the amino acid sequence disclosed at UniProt accession no: P00338-1, P00338-2, P00338-3, P00338-4, or P00338-5 (entry version 224) or a fragment thereof; and/or
[4260] a Lactate Dehydrogenase (LDH) biomarker comprises an amino acid sequence having at least 70%, 80%, 90%, 95%, 99% or 100% sequence identity with the full-length of the amino acid sequence disclosed at UniProt accession no: P07195-1 (entry version 218) or a fragment thereof.

[4261] The biomarkers described herein may also be defined as a nucleic acid (either DNA or RNA) having at least 70%, 80%, 90%, 95%, 99% or 100% sequence identity with the full-length nucleic acid sequence encoding any of the above amino acid sequences.

[4262] Identity may be as defined using sequence comparisons made using FASTA and FASTP (see Pearson & Lipman, 1988. Methods in Enzymology 183: 63-98). Parameters are preferably set, using the default matrix, as follows: Gapopen (penalty for the first residue in a gap): −12 for proteins/-16 for DNA; Gapext (penalty for additional residues in a gap): −2 for proteins/-4 for DNA; KTUP word length: 2 for proteins/6 for DNA.

[4263] Pre-Treatment Predictive Biomarkers and Methods

[4264] By analysing patient data obtained from clinical trial BGBIL006 (NCT02872259) and BGBC008 (NCT03184571), the authors have discovered that, prior to treatment of subjects having NSCLC or melanoma, the enzyme lactate dehydrogenase (LDH) is present in the serum of “responder” subjects at higher levels than in the serum of “non-responder” subjects—see Example 7. Thus, by assessing the activity, expression, or amount of this biomarker prior to treatment with an agent capable of inhibiting or reversing EMT or a chemotherapeutic agent it is possible to determine the likelihood of that subject being susceptible or responsive to treatment with said agent.

[4265] Accordingly, in a first aspect of this facet, the disclosure provides a method of predicting a cancer-related outcome in a subject having, suspected of having, or diagnosed with non-small cell lung cancer (NSCLC) or melanoma, the method comprising assessing the activity, expression, or amount of the biomarker LDH in the subject, or in a sample derived from the subject.

[4266] In embodiments in which the subject is a subject having, suspected of having, or diagnosed with non-small cell lung cancer (NSCLC), the method may comprise assessing the activity, expression, or amount of the biomarker LDH and one or more biomarker selected from the group consisting of: Axl, Beta Amyloid 1-40 (AB-40), Aggrecan core protein (Aggrecan), Ferritin (FRTN), Receptor for advanced glycosylation end products (RAGE), Neuronal Cell Adhesion Molecule (Nr-CAM), Sclerostin, Prostate-Specific Antigen, Free (PSA-f), Epidermal Growth Factor Receptor (EGFR), Neurofilament heavy polypeptide (NF-H), Dopamine beta-hydroxylase (DBH), Fibulin-1C (Fib-1C), Myoglobin, Urokinase-type Plasminogen Activator (uPA), Visceral adipose tissue-derived serpin A12 (Vaspin), Interleukin-23 (IL-23), Alpha-2-Macroglobulin (A2Macro), Tissue Inhibitor of Metalloproteinases 2 (TIMP-2), Thyroid-Stimulating Hormone (TSH), Tetranectin, Myeloid Progenitor Inhibitory Factor 1 (MPIF-1), Pancreatic Polypeptide (PPP), Interleukin-7 (IL-7), Pulmonary and Activation-Regulated Chemokine (PARC), Cancer Antigen 15-3 (CA-15-3), Pepsinogen I (PGI), Apolipoprotein E (Apo E), Apolipoprotein C-I (Apo C-I), Macrophage-Stimulating Protein (MSP), C-C motif chemokine 15 (CCL15), Progranulin, Carcinoembryonic antigen-related cell adhesion molecule 1 (CEACAM1), Vitamin D-Binding Protein (VDBP), Carbonic anhydrase 9 (CA-9), and/or Lactate Dehydrogenase (LDH) in the subject, or in a sample derived from the subject.

[4267] In embodiments in which the subject is a subject having, suspected of having, or diagnosed with melanoma, the method may comprise assessing the activity, expression, or amount of the biomarker LDH and one or more biomarker selected from the group consisting of: Axl, Interleukin-6 receptor (IL-6r), Chemokine CC-4 (HCC-4), Tissue Inhibitor of Metalloproteinases 1 (TIMP-1), Heparin-Binding EGF-Like Growth Factor (HB-EGF), Antileukoproteinase (ALP), Latency-Associated Peptide of Transforming Growth Factor beta 1 (LAP TGF-b1), Epidermal Growth Factor (EGF), Platelet-Derived Growth Factor BB (PDGF-BB), Osteoprotegerin (OPG), Neutrophil Activating Peptide 2 (NAP-2), ST2, Tumor Necrosis Factor Receptor I (TNF RI), Vascular Endothelial Growth Factor (VEGF), and/or Growth-Regulated alpha protein (GRO-alpha) in the subject, or in a sample derived from the subject.

[4268] A “cancer-related outcome” as described herein is a clinical prediction or prognosis associated with cancer. In some embodiments the cancer-related outcome is susceptibility to treatment with an agent capable of inhibiting or reversing EMT or a chemotherapeutic agent.

[4269] In some embodiments the method comprises assessing the activity, expression, or amount of LDH in the subject, or in a sample derived from the subject, to obtain a sample profile of LDH; and, making a prediction based on the sample profile.

[4270] A “sample profile” as used herein is a numerical value or numerical range corresponding to the activity, expression, or amount of LDH determined in the subject or sample derived from the subject.

[4271] In some embodiments of the method the prediction is made by comparing the sample profile to a control profile. A “control profile” as used herein is a numerical value or numerical range corresponding to the activity, expression, or amount of LDH, determined in a control subject or population of control subjects. Suitable control profiles are described in more detail below.

[4272] Prior to treatment of a subject, LDH has been found to exhibit up-regulated expression in “responder” subjects—that is, LDH has been found to be present in the serum of “responder” subjects at higher levels than in the serum of “non-responder” subjects.

[4273] This difference in expression level between “responder” and “non-responder” subjects can also be expressed in the opposite way. That is to say, prior to treatment of a subject, LDH has been found to exhibit down-regulated expression in “non-responder” subjects—that is, LDH has been found to be present in the serum of “non-responder” subjects at lower levels than in the serum of “responder” subjects.

[4274] The discovery of this differential pattern of expression means that, by assessing the activity, expression, or amount of LDH prior to treatment of a subject with an agent, it is possible to determine the likelihood of that subject being susceptible or responsive to treatment with said agent. Accordingly, in particularly preferred embodiments the sample profile is obtained before the subject is contacted with or administered the agent capable of inhibiting or reversing EMT or a chemotherapeutic agent.

[4275] A subject who is “susceptible to treatment” with an agent capable of inhibiting or reversing EMT or a chemotherapeutic agent is one who is likely to, or who does, respond to treatment (or benefit from treatment) with an agent capable of inhibiting or reversing EMT or a chemotherapeutic agent. That is, a subject who is “susceptible to treatment” with an agent is a “responder” subject for that agent, as defined above. A prediction that is “indicative of susceptibility” is one which suggests or points towards the likelihood that a subject will respond to or benefit from treatment.

[4276] In some embodiments the predictive methods of the disclosure comprise assessing the activity, expression, or amount of LDH in the subject, or in a sample derived from the subject, to obtain a sample profile of LDH; and, making a prediction based on the sample profile. In some embodiments of the method the prediction is made by comparing the sample profile to a control profile, wherein the control profile is a numerical value or numerical range corresponding to the activity, expression, or amount of LDH, determined in a control subject or population of control subjects.

[4277] In some embodiments the control profile may be obtained from a population of control subjects having NSCLC and/or a population of control subjects having melanoma. In some embodiments the control profile may be obtained from a population of control subjects not having NSCLC and/or a population of control subjects not having melanoma. In other embodiments the control profile may be obtained from a control subject or population of control subjects having NSCLC and previously found to lack susceptibility to treatment with an agent capable of inhibiting or reversing EMT or a chemotherapeutic agent (that is, non-responder subjects) and/or a control subject or population of control subjects having melanoma and previously found to lack susceptibility to treatment with an agent capable of inhibiting or reversing EMT or a chemotherapeutic agent (that is, non-responder subjects).

[4278] In some embodiments the control profile may be a predetermined profile of LDH expression, activity, or amount values, for example a “mean” value, “threshold” value, or “standard range” of values. This predetermined profile of LDH expression, activity, or amount values can be obtained, for example, from a control subject or population of control subjects having NSCLC and/or a control subject or population of control subjects having melanoma, or from a control subject or population of control subjects not having NSCLC and/or a control subject or population of control subjects not having melanoma. This predetermined profile of LDH expression, activity, or amount values could also be obtained, for example, from or a control subject or population of control subjects having NSCLC and previously found to lack susceptibility to treatment with an agent capable of inhibiting or reversing EMT or a chemotherapeutic agent (that is, non-responder subjects) and/or a control subject or population of control subjects having melanoma and previously found to lack susceptibility to treatment with an agent capable of inhibiting or reversing EMT or a chemotherapeutic agent (that is, non-responder subjects).

[4279] In some other embodiments the control profile may be obtained from a control subject or population of control subjects having NSCLC and previously found to be susceptible to treatment with an agent capable of inhibiting or reversing EMT or a chemotherapeutic agent (that is, responder subjects) and/or a control subject or population of control subjects having melanoma and previously found to be susceptible to treatment with an agent capable of inhibiting or reversing EMT or a chemotherapeutic agent (that is, responder subjects). In some embodiments the control profile may a predetermined profile of biomarker expression, activity, or amount values, for example a “threshold” value or “standard range” of values. This predetermined profile of biomarker expression, activity, or amount values can be obtained, for example, from a control subject or population of control subjects having NSCLC and previously found to be susceptible to treatment with an agent capable of inhibiting or reversing EMT or a chemotherapeutic agent (that is, responder subjects) and/or a control subject or population of control subjects having melanoma and previously found to be susceptible to treatment with an agent capable of inhibiting or reversing EMT or a chemotherapeutic agent (that is, responder subjects).

[4280] In some other embodiments the control profile may be obtained from a control sample having a known amount (for example a “threshold” amount) of LDH. This threshold amount can be obtained, for example, from non-responder or responder subjects as outlined above.

[4281] The skilled person is readily able to determine suitable “mean”, “threshold”, or “standard range” values for a particular biomarker.

[4282] For example, a “mean” value may be determined by: assessing the activity, expression, or amount of a particular biomarker in a population of subjects having (or not having) NSCLC and/or a control subject or population of control subjects having (or not having) melanoma; and, averaging the biomarker activity, expression, or amount determined to determine a “mean” value.

[4283] For example, a “mean” value may be determined by: assessing the activity, expression, or amount of a particular biomarker in a population of subjects; determining which subjects in the population are susceptible to treatment with an agent capable of inhibiting or reversing EMT or a chemotherapeutic agent; and, averaging the biomarker activity, expression, or amount determined in subjects found to be susceptible to treatment with an agent capable of inhibiting or reversing EMT or a chemotherapeutic agent (that is, responder subjects) to determine a “mean” value.

[4284] For example, a “threshold” value may be determined by: assessing the activity, expression, or amount of a particular biomarker in a population of subjects; determining which subjects in the population are susceptible to treatment with an agent capable of inhibiting or reversing EMT or a chemotherapeutic agent; and, selecting as appropriate the highest or lowest biomarker activity, expression, or amount determined in a subject found to be susceptible to treatment with an agent capable of inhibiting or reversing EMT or a chemotherapeutic agent (that is, a responder subject) as the “threshold value”.

[4285] For example, a “standard range” of values may be determined by: assessing the activity, expression, or amount of a particular biomarker in a population of subjects having (or not having) NSCLC and/or a control subject or population of control subjects having (or not having) melanoma; and, determining a “standard range” of values based on this assessment.

[4286] For example, a “standard range” of values may be determined by: assessing the activity, expression, or amount of a particular biomarker in a population of subjects; determining which subjects in the population are susceptible to treatment with an agent capable of inhibiting or reversing EMT or a chemotherapeutic agent; and, determining a “standard range” of values for subjects found to be susceptible to treatment with an agent capable of inhibiting or reversing EMT or a chemotherapeutic agent (that is, a responder subject) based on this assessment.

[4287] Where the control profile is a predetermined profile of LDH expression, activity, or amount values, this may be provided as a “look-up table” or data record. Predetermined control profiles of this type may be a numerical value or numerical range corresponding to a measure of central tendency (such as an average, median or mean) amount of LDH determined in a plurality of control subjects (for example non-responder or responder subjects as outlined above). The skilled person is readily able to determine both a measure of central tendency and a measure of variability within a population using standard protein quantification techniques and suitable statistical tools.

[4288] Accordingly, in embodiments in which the control profile is: obtained from a population of control subjects having NSCLC and/or a population of control subjects having melanoma; obtained from a population of control subjects not having NSCLC and/or a population of control subjects not having melanoma; obtained from a control subject or population of control subjects having NSCLC and previously found to lack susceptibility to treatment with an agent capable of inhibiting or reversing EMT or a chemotherapeutic agent (that is non-responder subjects) and/or a control subject or population of control subjects having melanoma and previously found to lack susceptibility to treatment with an agent capable of inhibiting or reversing EMT or a chemotherapeutic agent (that is non-responder subjects); a predetermined profile of LDH expression, activity, or amount values (for example a profile of “average, median, or mean” values or “standard ranges” of values) obtained from non-responder subjects; obtained from a control sample having a known “average, median, or mean” value of LDH indicative of non-responder subjects; a predetermined profile of LDH expression, activity, or amount “threshold” values obtained from responder subjects; or, obtained from a control sample having a known “threshold” value of LDH indicative of responder subjects; then, a higher activity, expression, or amount of LDH in a sample profile as compared with the control profile may be indicative of susceptibility to treatment with an agent capable of inhibiting or reversing EMT or a chemotherapeutic agent. Similarly, a lower activity, expression, or amount of LDH in the sample profile as compared with a control profile may be indicative of lack of susceptibility to treatment with an agent capable of inhibiting or reversing EMT or a chemotherapeutic agent.

[4289] In embodiments in which the control profile is: obtained from a control subject or population of control subjects having NSCLC and previously found to be susceptible to treatment with an agent capable of inhibiting or reversing EMT or a chemotherapeutic agent (that is, responder subjects); then, if the expression, activity, or amount values in the sample profile are above a “threshold” value typical of a responder subject (that is, a subject having NSCLC and previously found to be susceptible to treatment with an agent capable of inhibiting or reversing EMT or a chemotherapeutic agent) this is indicative of susceptibility to treatment with an agent capable of inhibiting or reversing EMT or a chemotherapeutic agent. Similarly, if the expression, activity, or amount values in the sample profile are below the “threshold” value typical of a responder subject (that is, a subject having NSCLC and previously found to be susceptible to treatment with an agent capable of inhibiting or reversing EMT or a chemotherapeutic agent) this is indicative of a lack of susceptibility to treatment with an agent capable of inhibiting or reversing EMT or a chemotherapeutic agent.

[4290] In embodiments in which the control profile is: a predetermined profile of “standard ranges” of LDH expression, activity, or amount values obtained from responder subjects; then, if the expression, activity, or amount values in the sample profile are within the “standard range” of values typical of a responder subject (that is, a subject having NSCLC or melanoma and previously found to be susceptible to treatment with an agent capable of inhibiting or reversing EMT or a chemotherapeutic agent) this is indicative of susceptibility to treatment with an agent capable of inhibiting or reversing EMT or a chemotherapeutic agent. Similarly, if the expression, activity, or amount values in the sample profile are outside the “standard range” of values typical of a responder subject (that is, a subject having NSCLC or melanoma and previously found to be susceptible to treatment with an agent capable of inhibiting or reversing EMT or a chemotherapeutic agent) this is indicative of a lack of susceptibility to treatment with an agent capable of inhibiting or reversing EMT or a chemotherapeutic agent.

[4291] In embodiments in which the control profile is: a predetermined profile of “standard ranges” of LDH expression, activity, or amount values obtained from non-responder subjects; then, if the expression, activity, or amount values in the sample profile are within the “standard range” of values typical of a non-responder subject (that is, a subject having NSCLC or melanoma and previously found to lack susceptibility to treatment with an agent capable of inhibiting or reversing EMT or a chemotherapeutic agent) this is indicative of a lack of susceptibility to treatment with an agent capable of inhibiting or reversing EMT or a chemotherapeutic agent. Similarly, if the expression, activity, or amount values in the sample profile are outside the “standard range” of values typical of a non-responder subject (that is, a subject having NSCLC or melanoma and previously found to lack susceptibility to treatment with an agent capable of inhibiting or reversing EMT or a chemotherapeutic agent) this may be indicative of susceptibility to treatment with an agent capable of inhibiting or reversing EMT or a chemotherapeutic agent.

[4292] In embodiments in which the control profile is: obtained from a population of control subjects not having NSCLC and/or a control subject or population of control subjects not having melanoma; then, if the expression, activity, or amount values in the sample profile are outside a “standard range” of values typical of subjects not having NSCLC and/or subjects not having melanoma, this is indicative of susceptibility to treatment with an agent capable of inhibiting or reversing EMT or a chemotherapeutic agent. Similarly, if the expression, activity, or amount values in the sample profile are within a “standard range” of values typical of subjects not having NSCLC and/or subjects not having melanoma, this is indicative of a lack of susceptibility to treatment with an agent capable of inhibiting or reversing EMT or a chemotherapeutic agent. In such cases, an expression, activity or amount value may be outside the “standard range” of values when it is either above the upper limit of normal or below the lower limit of normal for a given biomarker. The upper limit of normal and lower limit of normal are the limits of the normal distribution of a given biomarker in a population of control subjects not having NSCLC and/or a control subject or population of control subjects not having melanoma.

[4293] In some preferred embodiments, the control profile is a predetermined profile of LDH expression, activity, or amount values. In some such preferred embodiments, the control profile is a “threshold” value determined by: assessing LDH activity, expression, or amount in a population of subjects; determining which subjects in the population are susceptible to treatment with an agent capable of inhibiting or reversing EMT or a chemotherapeutic agent; and, selecting the lowest LDH activity, expression, or amount determined in a subject found to be susceptible to treatment with an agent capable of inhibiting or reversing EMT or a chemotherapeutic agent (that is, a responder subject) as the “threshold” value.

[4294] In some such embodiments, the control threshold value of LDH is 287 units per litre (U/L). That is, in some embodiments, an activity of LDH biomarker higher than 287 units per litre (U/L) in a sample profile may be indicative of susceptibility to treatment with an agent capable of inhibiting or reversing EMT or a chemotherapeutic agent.

[4295] In other preferred embodiments, the control profile is a “standard range” of values determined by: assessing LDH activity, expression, or amount in a population of subjects not having NSCLC and/or a population of subjects not having melanoma; and, determining a “standard range” of values based on this assessment. In such embodiments, an expression, activity or amount value above or outside the “standard range” of values, for example above the upper limit of normal for LDH, may be indicative of susceptibility to treatment with an agent capable of inhibiting or reversing EMT or a chemotherapeutic agent.

[4296] The skilled person is readily able to determine whether the sample profile is indicative of susceptibility or lack of susceptibility to treatment with an agent capable of inhibiting or reversing EMT or a chemotherapeutic agent using suitable statistical tools and comparison with the appropriate control.

[4297] In some embodiments the sample profile may be compared with two or more control profiles as described above.

[4298] Subject

[4299] A “subject” as referred to herein is any species of animal classified as a mammal, and includes but is not restricted to, domestic and farm animals, primates and humans. In some preferred embodiments the subject is a human of any sex or race. In some embodiments, the human is an adult human.

[4300] In some embodiments the predictive methods described herein are performed before the subject receives a treatment or course of treatment for NSCLC or melanoma. In other embodiments the predictive method is performed during or after a treatment or course of treatment for NSCLC or melanoma. In some embodiments the treatment or course of treatment for NSCLC or melanoma is an agent capable of inhibiting or reversing EMT. In other embodiments the treatment or course of treatment for NSCLC or melanoma is a chemotherapeutic treatment that is not an agent capable of inhibiting or reversing EMT.

[4301] In some embodiments of the predictive methods described herein the subject has previously been treated with an agent capable of inhibiting or reversing EMT or a chemotherapeutic agent. In some embodiments the subject has previously been treated with an agent selected from: a PHGDH inhibitor, a Slfn11 inhibitor, an Axl inhibitor, or an Akt3 inhibitor.

[4302] In some embodiments of the predictive methods described herein the subject has previously been treated with an agent that is different to the agent capable of inhibiting or reversing EMT or chemotherapeutic agent for which the subject's response is being predicted. That is, the subject has previously been treated with an agent that is not the agent which the predictive method is determining the subject's susceptibility to. Accordingly, in some embodiments, the subject has not previously been treated with an agent capable of inhibiting or reversing EMT or a chemotherapeutic agent. In some preferred embodiments, the subject has not previously been treated with an Axl inhibitor. In other preferred embodiments, the subject has not previously been treated with an Akt3 inhibitor.

[4303] Agents Capable of Inhibiting or Reversing EMT

[4304] The present disclosure provides methods for predicting a cancer-related outcome in a subject having, suspected of having, or diagnosed with non-small cell lung cancer (NSCLC) or melanoma. A “cancer-related outcome” is a clinical prediction or prognosis associated with cancer.

[4305] The agents capable of inhibiting or reversing EMT for use in this facet of the disclosure are defined as described above in the AML facet (see identically titled section above on page 14, line 19 to page 17, line 2).

[4306] In some embodiments in which the subject has, is suspected of having, or has been diagnosed with non-small cell lung cancer (NSCLC) the further cancer treatment is a PD-1 inhibitor or PD-L1 inhibitor. In some such embodiments the further cancer treatment is a monoclonal antibody such as pembrolizumab, alemtuzumab, bevacizumab, cetuximab, ibritumomab, tiuxetan, or rituximab

[4307] In some embodiments in which the subject has, is suspected of having, or has been diagnosed with melanoma the further cancer treatment is a PD-1 inhibitor or PD-L1 inhibitor. In some preferred embodiments the further cancer treatment is a monoclonal antibody such as pembrolizumab, alemtuzumab, bevacizumab, cetuximab, ibritumomab tiuxetan, or rituximab, or is a B-Raf inhibitor such as debrafenib, a MEK inhibitor such as trametinib or a combination therapy of these agents. In some particularly preferred embodiments the further cancer treatment is pembrolizumab. In other particularly preferred embodiments the further cancer treatment is a combination therapy of debrafenib and trametinib.

[4308] Assessing Biomarker Activity, Expression, Amount

[4309] In some embodiments of the predictive methods described herein, assessing the activity, expression, or amount of LDH in a subject, or in a sample derived from a subject, comprises: contacting a sample, or an extract from a sample, with a reagent for detecting the activity, expression, or amount of LDH, which reagent is selective for LDH; and, detecting and/or quantifying said reagents for detecting.

[4310] In some preferred embodiments, assessing the activity of LDH comprises determining the enzymatic activity of LDH in the subject or sample derived from the subject. Preferably the enzymatic activity is assessed by determining the level or amount of a substrate or product of the enzymatic reaction catalysed by LDH in the subject or sample derived from the subject. In particularly preferred embodiments the enzymatic activity is assessed by determining the level or amount of reduced nicotinamide adenine dinucleotide (NADH) in the subject or sample derived from the subject. In some embodiments this may be determined using a colorimetric assay, for example, the colorimetric assay available from Sigma-Aldrich with catalogue number MAK066. Other suitable assays for assessing activity of LDH are well known to the skilled person. In particularly preferred embodiments the activity of LDH is assessed by determining the enzymatic activity of LDH in blood or serum.

[4311] In some embodiments, assessing the expression or amount of LDH comprises determining the level of LDH protein or mRNA in the subject or sample derived from the subject. The expression or amount of LDH may be assessed by determining the level of protein expression. The expression or amount of LDH may be assessed by determining the level of protein expression in serum.

[4312] The term “expression” refers to the transcription of a gene's DNA template to produce the corresponding mRNA and translation of this mRNA to produce the corresponding gene product (i.e., a peptide, polypeptide, or protein) as well as the “expression” of a protein in one or more forms that may have been modified post translation.

[4313] In some embodiments determining the level of LDH protein or mRNA comprises: contacting a sample, or an extract from a sample, with a specific binding members, which specific binding member selectively binds to LDH protein or mRNA; and, detecting and/or quantifying formation of complex formed by said specific binding member and said LDH protein or mRNA. In some embodiments the specific binding member may comprise an antibody molecule or a binding fragment thereof.

[4314] A range of suitable techniques for determining protein and mRNA expression levels are well known in the art, for example microarray analysis, Western blotting, and PCR techniques such as QPCR. In some embodiments, determining the expression or amount of the one or more biomarker protein or mRNA may comprise use of a technique selected from: Western blot; enzyme-linked immunosorbent assay (ELISA); radioimmunoassay (RIA); competitive enzyme immunoassay; double antibody sandwich ELISA (DAS-ELISA); liquid immunoarray technology; immunocytochemistry; immunohistochemistry; antibody microarray detection; precipitation of colloidal gold; affinity chromatography; ligand binding assay; and lectin binding assay.

[4315] In some embodiments, the expression or amount of LDH is determined as an absolute amount of protein or mRNA in the sample. In such cases, the protein or mRNA may be quantified in the sample and the amount expressed as a measure of the sample, for example the volume, mass, or total protein content of the sample.

[4316] In some embodiments, the expression or amount of LDH is determined as a relative amount of protein or mRNA in the sample, wherein the relative amount is determined relative to a reference protein or mRNA in the sample. Determining the relative amount of LDH protein or mRNA in this way allows for normalisation to, e.g., account for differences in total protein concentration and to remove bias from sample to sample.

[4317] Preferably the reference protein or mRNA is one whose expression or amount does not vary significantly between subjects having cancer and subjects not having cancer, in particular NSCLC or melanoma. That is, the reference protein or mRNA is preferably one whose expression or amount is not altered by NSCLC or melanoma. Accordingly, the reference protein or mRNA may comprise one or more protein or mRNA which is not one of the biomarkers described herein. When expressing the expression or amount of LDH as a relative amount, the absolute amount of LDH protein or mRNA in the sample may be divided by the absolute amount of the reference protein or mRNA in the sample.

[4318] Assessing Biomarker Expression at the RNA Level

[4319] Gene expression can be detected at the RNA level. RNA may be extracted from cells using RNA extraction techniques including, for example, using acid phenol/guanidine isothiocyanate extraction (RNAzol B; Biogenesis), RNeasy RNA preparation kits (Qiagen) or PAXgene (PreAnalytix, Switzerland). Typical assay formats utilising ribonucleic acid hybridisation include nuclear run-on assays, RT-PCR, RNase protection assays (Melton et al., Nuc. Acids Res. 12:7035), Northern blotting and In Situ hybridization. Gene expression can also be detected by microarray analysis as described below.

[4320] Assessing Biomarker Expression at the Protein Level

[4321] LDH level may be assessed by measuring protein expression. Altered gene or protein expression may also be detected by measuring the polypeptides encoded by the gene. This may be achieved by using molecules which bind to the polypeptides encoded by the biomarker gene. Suitable molecules/agents which bind either directly or indirectly to the polypeptides in order to detect the presence of the protein include naturally occurring molecules such as peptides and proteins, for example antibodies, or they may be synthetic molecules.

[4322] Antibodies may be derived from commercial sources or through techniques which are familiar to those skilled in the art. In one embodiment, and where altered expression manifests itself through the expression of alteration of post translationally-modified forms of a protein biomarker, antibodies specific for those different forms may be used. For the purposes of this disclosure, the term “antibody”, unless specified to the contrary, includes whole antibodies, or fragments of whole antibodies which retain their binding activity for a target antigen. Such fragments include Fv, F(ab′) and F(ab′)2 fragments, as well as single chain antibodies (scFv). Furthermore, the antibodies and fragments thereof may be humanised antibodies, for example as described in EP239400A. For example: monoclonal and polyclonal antibodies, recombinant antibodies, proteolytic and recombinant fragments of antibodies (Fab, Fv, scFv, diabodies), single-domain antibodies (VHH, sdAb, nanobodies, IgNAR, VNAR), and proteins unrelated to antibodies, which have been engineered to have antibody-like specific binding. Antibodies may be bound to a solid support and/or packaged into kits in a suitable container along with suitable reagents, controls, instructions and the like.

[4323] Arrays

[4324] Array technology and the various techniques and applications associated with it are well known in the art. Array technology overcomes the disadvantages with traditional methods in molecular biology, which generally work on a “one gene in one experiment” basis, resulting in low throughput and the inability to appreciate the “whole picture” of gene function. In the context of the products and methods of the present disclosure, array technology can be used, for example, in the analysis of the expression of biomarker proteins or mRNA.

[4325] In general, any library or group of samples may be arranged in an orderly manner into an array, by spatially separating the members of the library or group. Examples of suitable libraries for arraying include nucleic acid libraries (including DNA, cDNA, oligonucleotide, etc. libraries), peptide, polypeptide and protein libraries, as well as libraries comprising any molecules, such as ligand libraries, among others. Accordingly, where reference is made to a “library” in this document, unless the context dictates otherwise, such reference should be taken to include reference to a library in the form of an array.

[4326] Proteins, polypeptides, etc., may also be immobilised in arrays. For example, antibodies have been used in microarray analysis of the proteome using protein chips (Borrebaeck C A, 2000, Immunol Today 21(8):379-82). Polypeptide arrays are reviewed in, for example, MacBeath and Schreiber, 2000, Science, 289(5485):1760-1763.

[4327] Sample

[4328] Suitable samples include, but are not limited to, tissue samples such as tissue biopsy, blood, urine, buccal scrapes etc., as well as serum, plasma, or tissue culture supernatant samples. In preferred embodiments the expression or amount of LDH is assessed by determining the level of protein expression in the sample. In some preferred embodiments the sample is a blood, serum, or plasma sample. In some particularly preferred embodiments the sample is a serum sample.

[4329] When assessing the expression or amount of LDH protein or mRNA in serum or plasma samples derived from a subject, samples are removed and subjected to analytical techniques such as flow cytometry, mass cytometry (CyTOF), ELISA, PET, and SELDI-TOF MS. In some embodiments, the method may comprise extracting RNA from said sample and detecting gene expression by QPCR. In some other embodiments, gene expression may be detected by detecting protein products by, for example, Western Blot.

[4330] In some embodiments, the level of expression of LDH is assessed by determining the copy number of the gene encoding the one or more biomarker. Copy number (i.e. gene duplication events) may be determined using standard techniques known in the art, e.g. using a DNA chip as described in Jiang et al. (Jiang Q, Ho Y Y, Hao L, Nichols Berrios C, Chakravarti A. Copy number variants in candidate genes are genetic modifiers of Hirschsprung disease. PLoS One. 2011; 6(6)).

[4331] Is some preferred embodiments of the predictive methods described herein, the method is performed in vitro or ex vivo.

[4332] Methods of Selecting a Subject for Treatment

[4333] A second aspect of this facet of the present disclosure relates to methods of selecting subjects having, suspected of having, or diagnosed with non-small cell lung cancer (NSCLC) or melanoma for treatment with an agent capable of inhibiting or reversing EMT or a chemotherapeutic agent. In some embodiments the method comprises: identifying subjects susceptible to treatment with an agent capable of inhibiting or reversing EMT or a chemotherapeutic agent using a predictive method defined in accordance with the above described first aspect of this facet of the disclosure; and, selecting thus identified subjects for treatment.

[4334] In some embodiments this aspect relates to methods of selecting subjects having, suspected of having, or diagnosed with non-small cell lung cancer (NSCLC) or melanoma for continued treatment with an agent capable of inhibiting or reversing EMT or a chemotherapeutic agent.

[4335] In some embodiments of this aspect of the disclosure, the treatment comprises administering to the subject a therapeutically effective amount of an agent capable of inhibiting or reversing EMT or a chemotherapeutic agent as described herein. Accordingly, in some embodiments the treatment comprises an Axl inhibitor, Akt3 inhibitor, Slfn11 inhibitor, or PHGDH inhibitor. In some preferred embodiments the treatment comprises an Axl inhibitor, for example, BGB324/R428/bemcentinib, cabozantinib, TP-0903, foretinib, merestinib, bosutinib, gilteritinib, crizotinib, amuvatinib, sunitinib, sitravatinib, LDC1267, or UNC2025. Other Axl inhibitors include the anti-Axl antibodies described in WO2015/193428, WO2015/193430, WO2016/097370, and WO2016/166296. In some preferred embodiments the Axl inhibitor is an anti-Axl antibody described in WO2015/193428, WO2015/193430, WO2016/097370, or WO2016/166296. In some particularly preferred embodiments the Axl inhibitor is BGB324/R428/bemcentinib.

[4336] In some other preferred embodiments, the treatment comprises an Akt3 inhibitor. In some embodiments the Akt3 inhibitor is an Akt3 inhibitor disclosed in WO2016/102672.

[4337] In some embodiments of this aspect of the disclosure, the treatment is administered as a single agent. In other embodiments, the treatment is administered in combination with a further cancer treatment. Suitable further cancer treatments are outlined in detail above.

[4338] In some embodiments in which the subject has, is suspected of having, or has been diagnosed with non-small cell lung cancer (NSCLC) the further cancer treatment is a PD-1 inhibitor or PD-L1 inhibitor. In some such embodiments the further cancer treatment is a monoclonal antibody such as pembrolizumab, alemtuzumab, bevacizumab, cetuximab, ibritumomab, tiuxetan, or rituximab

[4339] In some embodiments in which the subject has, is suspected of having, or has been diagnosed with melanoma the further cancer treatment is a PD-1 inhibitor or PD-L1 inhibitor. In some preferred embodiments the further cancer treatment is a monoclonal antibody such as pembrolizumab, alemtuzumab, bevacizumab, cetuximab, ibritumomab tiuxetan, or rituximab, or is a B-Raf inhibitor such as debrafenib, a MEK inhibitor such as trametinib or a combination therapy of these agents. In some particularly preferred embodiments the further cancer treatment is pembrolizumab. In other particularly preferred embodiments the further cancer treatment is a combination therapy of debrafenib and trametinib.

[4340] Kits

[4341] A third aspect of this facet of the present disclosure relates to diagnostic kits and test devices. In some embodiments the disclosure provides a diagnostic kit comprising a reagent for detecting the activity, expression, or amount of LDH, which reagent for detecting is selective for LDH.

[4342] In other embodiments the disclosure provides a test device comprising a reagent for detecting the activity, expression, or amount of LDH, which reagent for detecting is selective for LDH.

[4343] In some embodiments the diagnostic kit or test device comprises a reagent for determining the enzymatic activity of LDH. In some embodiments the diagnostic kit or test device comprises a reagent for determining the level or amount of a substrate or product of the enzymatic reaction catalysed by LDH. In some embodiments the diagnostic kit or test device comprises a reagent for determining the level or amount of reduced nicotinamide adenine dinucleotide (NADH). In some embodiments the diagnostic kit or test device comprises a probe specific for NADH. In some embodiments the probe interacts with NADH to produce a signal, for example a colour.

[4344] In some embodiments the diagnostic kit or test device comprises a specific binding member which selectively binds to LDH; and, one or more reagents for detecting said specific binding members, or one or more reagents for detecting and/or quantifying formation of a complex formed by said specific binding member and LDH.

[4345] In some embodiments of this aspect of the disclosure the diagnostic kit or test device comprises a plurality of said specific binding members provided in the form of an array on a substrate or conjugated to a plurality of particles, such as beads or microspheres. The particles may be encoded with a detectable label. In some embodiments the specific binding member comprises an antibody molecule or a binding fragment thereof.

[4346] In some embodiments of the diagnostic kit or test device detecting formation of a complex formed by a specific binding member and LDH is carried out by use of a technique selected from: Western blot; enzyme-linked immunosorbent assay (ELISA); radioimmunoassay (RIA); competitive enzyme immunoassay; double antibody sandwich ELISA (DAS-ELISA); liquid immunoarray technology; immunocytochemistry; immunohistochemistry; antibody microarray detection; precipitation of colloidal gold; affinity chromatography; ligand binding assay; and lectin binding assay.

[4347] In some embodiments of the diagnostic kit or test device, the kit or test device comprises no more than 2, 5, 10, 15, 20, 25, 30, 40, or 50 reagents for detecting. In some embodiments of the diagnostic kit or test device, the kit or test device comprises no more than 2, 5, 10, 15, 20, 25, 30, 40, or 50 specific binding members.

[4348] The present disclosure also provides use of such diagnostic kits and test devices in methods of predicting a cancer-related outcome in a subject. In preferred embodiments the cancer-related outcome is susceptibility to treatment with an agent capable of inhibiting or reversing EMT or a chemotherapeutic agent as described herein.

[4349] In some embodiments the agent capable of inhibiting or reversing EMT or chemotherapeutic agent is an Axl inhibitor, Akt3 inhibitor, Slfn11 inhibitor, or PHGDH inhibitor. In some preferred embodiments the agent capable of inhibiting or reversing EMT or chemotherapeutic agent is an Axl inhibitor, for example BGB324/R428/bemcentinib, cabozantinib, TP-0903, foretinib, merestinib, bosutinib, gilteritinib, crizotinib, amuvatinib, sunitinib, sitravatinib, LDC1267, or UNC2025. Other Axl inhibitors include the anti-Axl antibodies described in WO2015/193428, WO2015/193430, WO2016/097370, and WO2016/166296. In some preferred embodiments the Axl inhibitor is an anti-Axl antibody described in WO2015/193428, WO2015/193430, WO2016/097370, or WO2016/166296. In some particularly preferred embodiments the Axl inhibitor is BGB324/R428/bemcentinib.

[4350] In some embodiments of the diagnostic kit or test device for use in a predictive method, the subject has, is suspected of having, or has been diagnosed with NSCLC or melanoma. In some embodiments of the diagnostic kit or test device for use in a predictive method, the subject has, is suspected of having, or has been diagnosed with NSCLC. In some embodiments of the diagnostic kit or test device for use in a predictive method, the subject has, is suspected of having, or has been diagnosed with melanoma.

[4351] In some embodiments the method may be as defined in accordance with the above described first aspect of this facet of the disclosure.

[4352] A fourth aspect of this facet of the present disclosure relates to the use of a reagent for detecting the activity, expression, or amount of LDH, in a method of predicting a cancer-related outcome in a subject.

[4353] A fifth aspect of this facet of the disclosure relates to the use of a reagent for detecting the activity, expression, or amount of LDH, which reagent for detecting is selective for LDH, in a method of manufacture of a diagnostic kit or test device for use in a method of predicting a cancer-related outcome in a subject. In some embodiments of these uses the reagent for detecting comprises a specific binding member selective for a particular biomarker. The specific binding member may comprise an antibody molecule or a binding fragment thereof.

[4354] In some embodiments the method may be as defined in accordance with the above described first aspect of this facet of the disclosure.

[4355] Uses

[4356] A sixth aspect of this facet of the present disclosure relates to the use of LDH as a biomarker for determining if a subject is susceptible to treatment with an agent capable of inhibiting or reversing EMT or a chemotherapeutic agent.

[4357] In some embodiments the use relates to use of LDH, and at least 1, 2, 3, 4, 5, 6, 7, 8, 9, 10, or more of: Axl, AB-40, Aggrecan, FRTN, RAGE, Nr-CAM, Sclerostin, PSA-f, EGFR, NF-H, DBH, Fib-1C, Myoglobin, uPA, Vaspin, IL-23, A2Macro, TIMP-2, TSH, Tetranectin, MPIF-1, PPP, IL-7, PARC, CA-15-3, PGI, Apo E, Apo C-I, MSP, CCL15, Progranulin, CEACAM1, VDBP, and/or CA-9 as a biomarker for determining if a subject is susceptible to treatment with an agent capable of inhibiting or reversing EMT or a chemotherapeutic agent.

[4358] In some embodiments the use relates to use of LDH, and at least 1, 2, 3, 4, 5, 6, 7, 8, 9, 10, or more of: Axl, IL-6r, HCC-4, TIMP-1, HB-EGF, ALP, LAP TGF-b1, EGF, PDGF-BB, OPG, NAP-2, ST2, TNF RI, VEGF, and/or GRO-alpha as a biomarker for determining if a subject is susceptible to treatment with an agent capable of inhibiting or reversing EMT or a chemotherapeutic agent.

[4359] In some embodiments the use is as a biomarker in a method as defined in accordance with the above described first aspect of this facet of the disclosure.

[4360] Methods of Treating a Subject

[4361] A seventh aspect of this facet of the present disclosure relates to methods of treating a subject having, suspected of having, or diagnosed with non-small cell lung cancer (NSCLC) or melanoma. In some embodiments the method comprises: identifying a subject for treatment using a predictive method defined in accordance with the above described first aspect of this facet of the disclosure; and, administering to the subject a therapeutically effective amount of an agent capable of inhibiting or reversing EMT or a chemotherapeutic agent.

[4362] Accordingly, in some embodiments, the method comprises: (a) obtaining a sample from the subject; (b) determining if the subject is susceptible to treatment with an agent capable of inhibiting or reversing EMT or a chemotherapeutic agent using a predictive method defined in accordance with the above described first aspect of this facet of the disclosure; and, (c) administering to the subject a therapeutically effective amount of an agent capable of inhibiting or reversing EMT or a chemotherapeutic agent.

[4363] In some embodiments the method comprises administering a therapeutically effective amount of an agent capable of inhibiting or reversing EMT or chemotherapeutic agent to a subject identified as susceptible to said treatment using a predictive method defined in accordance with the above described first aspect of this facet of the disclosure.

[4364] An eighth aspect of this facet of the present disclosure relates to an agent capable of inhibiting or reversing EMT or chemotherapeutic agent for use in a method of treating a subject having, suspected of having, or diagnosed with non-small cell lung cancer (NSCLC) or melanoma. In some embodiments the method of treatment is a method as defined above.

[4365] A ninth aspect of this facet of the present disclosure relates to use of an agent capable of inhibiting or reversing EMT or chemotherapeutic agent for use in a method of manufacture of a medicament for use in a method of treating a subject having, suspected of having, or diagnosed with non-small cell lung cancer (NSCLC) or melanoma. In some embodiments the method of treatment is a method as defined above.

[4366] In some embodiments of these methods, agents for use, or uses, the agent capable of inhibiting or reversing EMT or chemotherapeutic agent comprises an Axl inhibitor, Akt3 inhibitor, Slfn11 inhibitor, or PHGDH inhibitor. In some preferred embodiments the agent capable of inhibiting or reversing EMT or chemotherapeutic agent is an Axl inhibitor, for example BGB324/R428/bemcentinib, cabozantinib, TP-0903, foretinib, merestinib, bosutinib, gilteritinib, crizotinib, amuvatinib, sunitinib, sitravatinib, LDC1267, or UNC2025. Other Axl inhibitors include the anti-Axl antibodies described in WO2015/193428, WO2015/193430, WO2016/097370, and WO2016/166296. In some preferred embodiments the Axl inhibitor is an anti-Axl antibody described in WO2015/193428, WO2015/193430, WO2016/097370, or WO2016/166296. In some particularly preferred embodiments the Axl inhibitor is BGB324/R428/bemcentinib.

[4367] In some other preferred embodiments, the treatment comprises an Akt3 inhibitor. In some embodiments the Akt3 inhibitor is an Akt3 inhibitor disclosed in WO2016/102672.

[4368] In some embodiments of these methods, agents for use, or uses, the treatment is administered as a single agent. In other embodiments, the treatment is administered in combination with a further cancer treatment. Suitable further cancer treatments are outlined in detail above.

[4369] In some preferred embodiments the further cancer treatment is a PD-1 inhibitor or PD-L1 inhibitor. In some preferred embodiments the further cancer treatment is a monoclonal antibody such as pembrolizumab, alemtuzumab, bevacizumab, cetuximab, ibritumomab tiuxetan, or rituximab, or is a B-Raf inhibitor such as debrafenib, a MEK inhibitor such as trametinib or a combination therapy of these agents. In some particularly preferred embodiments the further cancer treatment is pembrolizumab. In other particularly preferred embodiments the further cancer treatment is a combination therapy of debrafenib and trametinib.

[4370] Statements of Disclosure

[4371] The following numbered statements relate to aspects of this facet of the present disclosure, and form part of the description:
[4372] 1. A method of predicting a cancer-related outcome in a subject, the method comprising assessing the activity, expression, or amount of an LDH biomarker in the subject, or in a sample derived from the subject;
   [4373] wherein the subject has, is suspected of having, or has been diagnosed with non-small cell lung cancer (NSCLC) or melanoma.
[4374] 2. A method according to statement 1, wherein the method comprises:
   [4375] assessing the activity, expression, or amount of one an LDH biomarker in the subject, or in a sample derived from the subject, to obtain a sample profile of the LDH biomarker; and
   [4376] making a prediction based on the sample profile of the LDH biomarker;
   [4377] optionally wherein the prediction is made by comparing the sample profile to a control profile.
[4378] 3. A method according to statement 2, wherein the sample profile is obtained before the subject is contacted with or administered an agent capable of inhibiting or reversing EMT or a chemotherapeutic agent.
[4379] 4. A method according to statement 3, wherein the control profile is:
   [4380] (i) obtained from a population of control subjects having non-small cell lung cancer (NSCLC) or melanoma; or
   [4381] (ii) obtained from a population of control subjects not having non-small cell lung cancer (NSCLC) or melanoma; or
   [4382] (iii) obtained from a control subject or population of control subjects having non-small cell lung cancer (NSCLC) or melanoma and previously found to lack susceptibility to treatment with an agent capable of inhibiting or reversing EMT or a chemotherapeutic agent;
   [4383] (iv) a predetermined profile of “average, median, or mean” or “standard ranges” of biomarker expression, activity, or amount values obtained from a control subject or population of control subjects having non-small cell lung cancer (NSCLC) or melanoma and previously found to lack susceptibility to treatment with an agent capable of inhibiting or reversing EMT or a chemotherapeutic agent;
   [4384] (v) obtained from a control sample having a known “average, median, or mean” value of biomarkers indicative of a control subject or population of control subjects having non-small cell lung cancer (NSCLC) or melanoma and previously found to lack susceptibility to treatment with an agent capable of inhibiting or reversing EMT or a chemotherapeutic agent;
   [4385] (vi) a predetermined profile of biomarker expression, activity, or amount “threshold” values obtained from a control subject or population of control subjects having non-small cell lung cancer (NSCLC) or melanoma and previously found to be susceptible to treatment with an agent capable of inhibiting or reversing EMT or a chemotherapeutic agent; or
   [4386] (vii) obtained from a control sample having a known “threshold” value of biomarkers indicative of a control subject or population of control subjects having non-small cell lung cancer (NSCLC) or melanoma and previously found to be susceptible to treatment with an agent capable of inhibiting or reversing EMT or a chemotherapeutic agent.
[4387] 5. A method according to statement 4, wherein the control profile is:
   [4388] (i) a “threshold” value determined by: assessing LDH activity, expression, or amount in a population of subjects; determining which subjects in the population are susceptible to treatment with an agent capable of inhibiting or reversing EMT or a chemotherapeutic agent; and, selecting the lowest LDH activity, expression, or amount determined in a subject found to be susceptible to treatment with an agent capable of inhibiting or reversing EMT or a chemotherapeutic agent (that is, a responder subject) as the “threshold” value; or
   [4389] (ii) a “standard range” of values determined by: assessing LDH activity, expression, or amount in a population of subjects not having NSCLC and/or a population of subjects not having melanoma; and, determining a “standard range” of LDH activity, expression, or amount values in these subjects.
[4390] 6. A method according to any one of statements 3-5, wherein a higher activity, expression, or amount of LDH biomarker in the sample profile as compared with the control profile is indicative of susceptibility to treatment with an agent capable of inhibiting or reversing EMT or a chemotherapeutic agent.
[4391] 7. A method according to any one of statements 1-6, wherein the method comprises assessing the activity, expression, or amount of one or more further biomarker selected from the group consisting of:
   [4392] (i) Axl, Beta Amyloid 1-40 (AB-40), Aggrecan core protein (Aggrecan), Ferritin (FRTN), Receptor for advanced glycosylation end products (RAGE), Neuronal Cell Adhesion Molecule (Nr-CAM), Sclerostin, Prostate-Specific Antigen, Free (PSA-f), Epidermal Growth Factor Receptor (EGFR), Neurofilament heavy polypeptide (NF-H), Dopamine beta-hydroxylase (DBH), Fibulin-1C (Fib-1C), Myoglobin, Urokinase-type Plasminogen Activator (uPA), Visceral adipose tissue-derived serpin A12 (Vaspin), Interleukin-23 (IL-23), Alpha-2-Macroglobulin (A2Macro), Tissue Inhibitor of Metalloproteinases 2 (TIMP-2), Thyroid-Stimulating Hormone (TSH), Tetranectin, Myeloid Progenitor Inhibitory Factor 1 (MPIF-1), Pancreatic Polypeptide (PPP), Interleukin-7 (IL-7), Pulmonary and Activation-Regulated Chemokine (PARC), Cancer Antigen 15-3 (CA-15-3), Pepsinogen I (PGI), Apolipoprotein E (Apo E), Apolipoprotein C-I (Apo C-I), Macrophage-Stimulating Protein (MSP), C-C motif chemokine 15 (CCL15), Progranulin, Carcinoembryonic antigen-related cell adhesion molecule 1 (CEACAM1), Vitamin D-Binding Protein (VDBP), Carbonic anhydrase 9 (CA-9), and/or Lactate Dehydrogenase (LDH); or
   [4393] (ii) Axl, Interleukin-6 receptor (IL-6r), Chemokine CC-4 (HCC-4), Tissue Inhibitor of Metalloproteinases 1 (TIMP-1), Heparin-Binding EGF-Like Growth Factor (HB-EGF), Antileukoproteinase (ALP), Latency-Associated Peptide of Transforming Growth Factor beta 1 (LAP TGF-b1), Epidermal Growth Factor (EGF), Platelet-Derived Growth Factor BB (PDGF-BB), Osteoprotegerin (OPG), Neutrophil Activating Peptide 2 (NAP-2), ST2, Tumor Necrosis Factor Receptor I (TNF RI), Vascular Endothelial Growth Factor (VEGF), and/or Growth-Regulated alpha protein (GRO-alpha);
   [4394] in the subject, or in a sample derived from the subject.
[4395] 8. A method according to any one of statements 1-7, wherein assessing the activity, expression, or amount of LDH biomarker in the subject, or in a sample derived from the subject, comprises:
   [4396] contacting a sample, or an extract from the sample, with a reagent for detecting the activity, expression, or amount of LDH biomarker, which reagent is selective for the LDH biomarker; and
   [4397] detecting and/or quantifying said reagent for detecting.
[4398] 9. A method according to statement 8, wherein assessing the activity of LDH biomarker in the subject, or in a sample derived from the subject, comprises determining the enzymatic activity of LDH in the subject or in a sample derived from the subject;

[4399] optionally wherein the enzymatic activity is assessed by determining the level or amount of a substrate or product of the enzymatic reaction catalysed by LDH
[4400] 10. A method according to statement 8, wherein assessing the expression or amount of LDH biomarker in the subject, or in a sample derived from the subject, comprises:
   [4401] contacting a sample, or an extract from the sample, with a specific binding member, which specific binding member selectively binds to LDH protein or mRNA; and
   [4402] detecting and/or quantifying formation of a complex formed by said specific binding member and said LDH protein or mRNA;
   [4403] optionally wherein the specific binding member comprises an antibody molecule or binding fragment thereof.
[4404] 11. A method according to any one of statements 3-10, wherein the agent capable of inhibiting or reversing EMT or chemotherapeutic agent is an Axl inhibitor.
[4405] 12. A method according to statement 11, wherein the Axl inhibitor is BGB324/R428/bemcentinib.
[4406] 13. A method according to statement 11, wherein the Axl inhibitor is an anti-Axl antibody described in WO2015/193428, WO2015/193430, WO2016/097370, or WO2016/166296
[4407] 14. A method according to any one of statements 3-13, wherein the agent capable of inhibiting or reversing EMT is administered in combination with a further cancer treatment.
[4408] 15. A method according to statement 14, wherein the further cancer treatment is a monoclonal antibody such as pembrolizumab, alemtuzumab, bevacizumab, cetuximab, ibritumomab tiuxetan, or rituximab, or is a B-Raf inhibitor such as debrafenib, a MEK inhibitor such as trametinib or a combination therapy of these agents.
[4409] 16. A method according to statement 15, wherein the further cancer treatment is pembrolizumab.
[4410] 17. A method according to statement 15, wherein the further cancer treatment is a combination therapy of debrafenib and trametinib.
[4411] 18. A method according to any one of statements 1-17, wherein the subject is mammalian; optionally wherein the subject is human.
[4412] 19. A method according to any one of statements 1-18, wherein the sample is a blood, serum, or plasma sample;

[4413] optionally wherein the sample is: (a) a serum sample; or (b) a blood sample.
[4414] 20. A method according to any one of statements 1-19, wherein the method is performed in vitro or ex vivo.
[4415] 21. A method of selecting subjects having, suspected of having, or diagnosed with non-small cell lung cancer (NSCLC) or melanoma for treatment with an agent capable of inhibiting or reversing EMT or a chemotherapeutic agent, the method comprising:
   [4416] identifying subjects susceptible to treatment with an agent capable of inhibiting or reversing EMT or a chemotherapeutic agent using a method according to any one of statements 1-20; and
   [4417] selecting thus identified subjects for treatment.
[4418] 22. A method according to statement 21 wherein the agent capable of inhibiting or reversing EMT or chemotherapeutic agent is an Axl inhibitor;

[4419] optionally wherein the agent capable of inhibiting or reversing EMT is administered in combination with a further cancer treatment.
[4420] 23. A diagnostic kit or test device comprising a reagent for detecting the activity, expression, or amount of an LDH biomarker, which reagent for detecting is selective for LDH.
[4421] 24. A diagnostic kit or test device according to statement 23 for use in a method of predicting a cancer-related outcome in a subject,
   [4422] optionally wherein the method is a method according to any one of statements 1-20.
[4423] 25. Use of LDH as a biomarker for determining if a subject is susceptible to treatment with an agent capable of inhibiting or reversing EMT or a chemotherapeutic agent,
   [4424] optionally wherein the use is as a biomarker in a method according to any one of statements 1-20.
[4425] 101. A method of predicting a cancer-related outcome in a subject, the method comprising assessing the activity, expression, or amount of an LDH biomarker in the subject, or in a sample derived from the subject;
   [4426] wherein the subject has, is suspected of having, or has been diagnosed with non-small cell lung cancer (NSCLC) or melanoma.
[4427] 102. A method according to statement 101, wherein the method comprises:
   [4428] assessing the activity, expression, or amount of an LDH biomarker in the subject, or in a sample derived from the subject, to obtain a sample profile of the LDH biomarker; and
   [4429] making a prediction based on the sample profile of the LDH biomarker.
[4430] 103. A method according to statement 101 or 102, wherein the method comprises assessing the activity, expression, or amount of one or more further biomarker selected from the group consisting of:
   [4431] (i) Axl, Beta Amyloid 1-40 (AB-40), Aggrecan core protein (Aggrecan), Ferritin (FRTN), Receptor for advanced glycosylation end products (RAGE), Neuronal Cell Adhesion Molecule (Nr-CAM), Sclerostin, Prostate-Specific Antigen, Free (PSA-f), Epidermal Growth Factor Receptor (EGFR), Neurofilament heavy polypeptide (NF-H), Dopamine beta-hydroxylase (DBH), Fibulin-1C (Fib-1C), Myoglobin, Urokinase-type Plasminogen Activator (uPA), Visceral adipose tissue-derived serpin A12 (Vaspin), Interleukin-23 (IL-23), Alpha-2-Macroglobulin (A2Macro), Tissue Inhibitor of Metalloproteinases 2 (TIMP-2), Thyroid-Stimulating Hormone (TSH), Tetranectin, Myeloid Progenitor Inhibitory Factor 1 (MPIF-1), Pancreatic Polypeptide (PPP), Interleukin-7 (IL-7), Pulmonary and Activation-Regulated Chemokine (PARC), Cancer Antigen 15-3 (CA-15-3), Pepsinogen I (PGI), Apolipoprotein E (Apo E), Apolipoprotein C-I (Apo C-I), Macrophage-Stimulating Protein (MSP), C-C motif chemokine 15 (CCL15), Progranulin, Carcinoembryonic antigen-related cell adhesion molecule 1 (CEACAM1), Vitamin D-Binding Protein (VDBP), Carbonic anhydrase 9 (CA-9), and/or Lactate Dehydrogenase (LDH); or
   [4432] (ii) Axl, Interleukin-6 receptor (IL-6r), Chemokine CC-4 (HCC-4), Tissue Inhibitor of Metalloproteinases 1 (TIMP-1), Heparin-Binding EGF-Like Growth Factor (HB-EGF), Antileukoproteinase (ALP), Latency-Associated Peptide of Transforming Growth Factor beta 1 (LAP TGF-b1), Epidermal Growth Factor (EGF), Platelet-Derived Growth Factor BB (PDGF-BB), Osteoprotegerin (OPG), Neutrophil Activating Peptide 2 (NAP-2), ST2, Tumor Necrosis Factor Receptor I (TNF RI), Vascular Endothelial Growth Factor (VEGF), and/or Growth-Regulated alpha protein (GRO-alpha);
   [4433] in the subject, or in a sample derived from the subject.
[4434] 104. A method according to statement 102 or 103, wherein the prediction is made by comparing the sample profile to a control profile.
[4435] 105. A method according to statement 104, wherein the sample profile is obtained before the subject is contacted with or administered an agent capable of inhibiting or reversing EMT or a chemotherapeutic agent.
[4436] 106. A method according to statement 105, wherein the control profile is:
   [4437] (i) obtained from a population of control subjects having non-small cell lung cancer (NSCLC) or melanoma; or
   [4438] (ii) obtained from a population of control subjects not having non-small cell lung cancer (NSCLC) or melanoma
   [4439] (iii) obtained from a control subject or population of control subjects having non-small cell lung cancer (NSCLC) or melanoma and previously found to lack susceptibility to treatment with an agent capable of inhibiting or reversing EMT or a chemotherapeutic agent (that is, non-responder subjects);
   [4440] (iv) a predetermined profile of LDH biomarker expression, activity, or amount values, for example a profile of “average, median, or mean” values or “standard ranges” of values, obtained from a control subject or population of control subjects having non-small cell lung cancer (NSCLC) or melanoma and previously found to lack susceptibility to treatment with an agent capable of inhibiting or reversing EMT or a chemotherapeutic agent (that is, non-responder subjects);
   [4441] (v) obtained from a control sample having a known “average, median, or mean” value of LDH biomarker indicative of a control subject or population of control subjects having non-small cell lung cancer (NSCLC) or melanoma and previously found to lack susceptibility to treatment with an agent capable of inhibiting or reversing EMT or a chemotherapeutic agent (that is, non-responder subjects);
   [4442] (vi) a predetermined profile of LDH biomarker expression, activity, or amount “threshold” values obtained from a control subject or population of control subjects having non-small cell lung cancer (NSCLC) or melanoma and previously found to be susceptible to treatment with an agent capable of inhibiting or reversing EMT or a chemotherapeutic agent (that is, responder subjects); or
   [4443] (vii) obtained from a control sample having a known “threshold” value of LDH biomarker indicative of a control subject or population of control subjects having non-small cell lung cancer (NSCLC) or melanoma and previously found to be susceptible to treatment with an agent capable of inhibiting or reversing EMT or a chemotherapeutic agent (that is, responder subjects).
[4444] 107. A method according to statement 105, wherein the control profile is:
   [4445] (i) a “threshold” value determined by: assessing LDH activity, expression, or amount in a population of subjects; determining which subjects in the population are susceptible to treatment with an agent capable of inhibiting or reversing EMT or a chemotherapeutic agent; and, selecting the lowest LDH activity, expression, or amount determined in a subject found to be susceptible to treatment with an agent capable of inhibiting or reversing EMT or a chemotherapeutic agent (that is, a responder subject) as the “threshold” value; or
   [4446] (ii) a “standard range” of values determined by: assessing LDH activity, expression, or amount in a population of subjects not having NSCLC and/or a population of subjects not having melanoma; and, determining a “standard range” of LDH activity, expression, or amount values in these subjects.
[4447] 108. A method according to statement 106 or 107, wherein a higher activity, expression, or amount of LDH biomarker in the sample profile as compared with the control profile is indicative of susceptibility to treatment with an agent capable of inhibiting or reversing EMT or a chemotherapeutic agent.
[4448] 109. A method according to any one of statements 101-108, wherein:
   [4449] said Lactate Dehydrogenase (LDH) biomarker comprises an amino acid sequence having at least 70%, 80%, 90%, 95%, 99% or 100% sequence identity with the full-length of the amino acid sequence disclosed at UniProt accession no: P00338-1, P00338-2, P00338-3, P00338-4, or P00338-5 (entry version 224) or a fragment thereof; and/or
   [4450] said Lactate Dehydrogenase (LDH) biomarker comprises an amino acid sequence having at least 70%, 80%, 90%, 95%, 99% or 100% sequence identity with the full-length of the amino acid sequence disclosed at UniProt accession no: P07195-1 (entry version 218) or a fragment thereof;
   [4451] or a nucleic acid (either DNA or RNA) having at least 70%, 80%, 90%, 95%, 99% or 100% sequence identity with the full-length nucleic acid sequence encoding said amino acid sequences.
[4452] 110. A method according to any one of statements 105-109, wherein assessing the activity, expression, or amount of LDH biomarker in the subject, or in a sample derived from the subject, comprises:
   [4453] contacting a sample, or an extract from the sample, with a reagent for detecting the activity, expression, or amount of LDH biomarker, which reagent is selective for the LDH biomarker; and
   [4454] detecting and/or quantifying said reagent for detecting.
[4455] 111. A method according to statement 110, wherein assessing the activity of LDH biomarker in the subject, or in a sample derived from the subject, comprises determining the enzymatic activity of LDH in the subject or in a sample derived from the subject;
   [4456] optionally wherein the enzymatic activity is assessed by determining the level or amount of a substrate or product of the enzymatic reaction catalysed by LDH.
[4457] 112. A method according to statement 110, wherein assessing the expression or amount of LDH biomarker in the subject, or in a sample derived from the subject, comprises:
   [4458] contacting a sample, or an extract from the sample, with a specific binding member, which specific binding member selectively binds to LDH protein or mRNA; and
   [4459] detecting and/or quantifying formation of a complex formed by said specific binding member and said LDH protein or mRNA.
[4460] 113. A method according to statement 112 wherein the specific binding member comprises an antibody molecule or binding fragment thereof.
[4461] 114. A method according to statement 112 or 113, wherein detecting formation of a complex formed by the specific binding member and the LDH biomarker protein or mRNA is carried out by use of a technique selected from: Western blot; enzyme-linked immunosorbent assay (ELISA); radioimmunoassay (RIA); competitive enzyme immunoassay; double antibody sandwich ELISA (DAS-ELISA); liquid immunoarray technology; immunocytochemistry; immunohistochemistry; antibody microarray detection; precipitation of colloidal gold; affinity chromatography; ligand binding assay; and lectin binding assay.
[4462] 115. A method according to any one of statements 112-114 wherein the expression or amount of the LDH biomarker is determined as the absolute amount of LDH biomarker protein or mRNA in the sample.
[4463] 116. A method according to any one of statements 112-114 wherein the expression or amount of the LDH biomarker is determined as a relative amount of protein or mRNA in the sample,
   [4464] optionally wherein the relative amount is determined relative to a reference protein or mRNA in the sample, the expression of which is not altered by non-small cell lung cancer (NSCLC) or melanoma.
[4465] 117. A method according to any one of statements 101-116, wherein the cancer-related outcome is susceptibility to treatment with an agent capable of inhibiting or reversing EMT or a chemotherapeutic agent.
[4466] 118. A method according to statement 117, wherein the agent capable of inhibiting or reversing EMT or chemotherapeutic agent is an Axl inhibitor, Akt3 inhibitor, Slfn11 inhibitor, or PHGDH inhibitor.
[4467] 119. A method according to statement 118, wherein the agent capable of inhibiting or reversing EMT or chemotherapeutic agent is an Axl inhibitor.
[4468] 120. A method according to statement 119, wherein the Axl inhibitor is BGB324/R428/bemcentinib, cabozantinib, TP-0903, foretinib, merestinib, bosutinib, gilteritinib, crizotinib, amuvatinib, sunitinib, sitravatinib, LDC1267, UNC2025, or an anti-Axl antibody described in WO2015/193428, WO2015/193430, WO2016/097370, or WO2016/166296.
[4469] 121. A method according to statement 119, wherein the Axl inhibitor is BGB324/R428/bemcentinib.
[4470] 122. A method according to statement 119, wherein the Axl inhibitor is an anti-Axl antibody described in WO2015/193428, WO2015/193430, WO2016/097370, or WO2016/166296.
[4471] 123. A method according to statement 118, wherein the agent capable of inhibiting or reversing EMT or chemotherapeutic agent is an Akt3 inhibitor.
[4472] 124. A method according to statement 123, wherein the Akt3 inhibitor is an Akt3 inhibitor disclosed in WO2016/102672.
[4473] 125. A method according to any one of statements 117-124, wherein the agent capable of inhibiting or reversing EMT is administered as a single agent.
[4474] 126. A method according to any one of statements 117-124, wherein the agent capable of inhibiting or reversing EMT is administered in combination with a further cancer treatment.
[4475] 127. A method according to statement 126, wherein the further cancer treatment is selected from:
   [4476] (i) alkylating agents, including alkyl sulfonates such as busulfan;
   [4477] (ii) nitrogen mustards such as chlorambucil, cyclophosphamide, estramustine, ifosfamide, mechlorethamine, melphalan, and uramustine;
   [4478] (iii) ethyleneimine derivatives such as thiotepa;
   [4479] (iv) nitrosoureas such as carmustine, lomustine, and streptozocin;
   [4480] (v) triazenes such as dacarbazine, procarbazine, and temozolamide;
   [4481] (vi) platinum compounds such as cisplatin, carboplatin, oxaliplatin, satraplatin, and picoplatin onnaplatin, tetraplatin, sprioplatin, iproplatin, chloro(diethylenediamino)-platinum (II) chloride, dichloro(ethylenediamino)-platinum (II), diamino(2-ethylmalonato)platinum (II), (1,2-diaminocyclohexane)malonatoplatinum (II), (4-carboxyphthalo)-(1,2-diaminocyclohexane)platinum (II), (1,2-diaminocyclohexane)-(isocitrato)platinum (II), and (1,2-diaminocyclohexane)-cis-(pyruvato)platinum (II);
   [4482] (vii) antimetabolites, including antifolates such as methotrexate, permetrexed, raltitrexed, and trimetrexate;
   [4483] (viii) pyrimidine analogues such as azacitidine, capecitabine, cytarabine, edatrexate, floxuridine, fluorouracil, gemcitabine, and troxacitabine;
   [4484] (ix) purine analogues such as cladribine, chlorodeoxyadenosine, clofarabine, fludarabine, mercaptopurine, pentostatin, and thioguanine;
   [4485] (x) natural products, including antitumor antibiotics such as bleomycin, dactinomycin, mithramycin, mitomycin, mitoxantrone, porfiromycin;
   [4486] (xi) anthracyclines such as daunorubicin, doxorubicin, epirubicin, idarubicin, and valrubicin;
   [4487] (xii) mitotic inhibitors such as the vinca alkaloids vinblastine, vinvesir, vincristine, vindesine, and vinorelbine;
   [4488] (xiii) enzymes such as L-asparaginase and PEG-L-asparaginase;
   [4489] (xiv) microtubule polymer stabilizers such as the taxanes paclitaxel and docetaxel;
   [4490] (xv) topoisomerase I inhibitors such as the camptothecins irinotecan and topotecan;
   [4491] (xvi) topoisomerase II inhibitors such as podophyllotoxin, amsacrine, etoposide, teniposide, losoxantrone and actinomycin;
   [4492] (xvii) hormones and hormone antagonists, including
      [4493] androgens such as fluoxymesterone and testolactone;
      [4494] antiandrogens such as bicalutamide, cyproterone, flutamide, and nilutamide;
      [4495] corticosteroids such as dexamethasone and prednisone;
      [4496] aromatase inhibitors such as aminoglutethimide, anastrozole, exemestane, formestane, and letrozole;
      [4497] estrogens such as diethylstilbestrol;
      [4498] antiestrogens such as fulvestrant, raloxifene, tamoxifen, and toremifine;
      [4499] luteinising hormone-releasing hormone (LHRH) agonists and antagonists such as abarelix, buserelin, goserelin, leuprolide, histrelin, desorelin, nafarelin acetate and triptorelin;
      [4500] progestins such as medroxyprogesterone acetate and megestrol acetate; and
      [4501] thyroid hormones such as levothyroxine and liothyronine;
   [4502] (xviii) PKB pathway inhibitors, including perifosine, enzastaurin hydrochloride, and triciribine;
   [4503] (xix) P13K inhibitors such as semaphore and SF1126, and MTOR inhibitors such as rapamycin and analogues;
   [4504] (xx) CDK inhibitors, including seliciclib, alvocidib, and 7-hydroxystaurosporine;
   [4505] (xxi) COX-2 inhibitors, including celecoxib;
   [4506] (xxii) HDAC inhibitiors, including trichostatin A, suberoylanilide hydroxamic acid, and chlamydocin;
   [4507] (xxiii) DNA methylase inhibitors, including temozolomide, and miscellaneous agents, including altretamine, arsenic trioxide, thalidomide, lenalidomide, gallium nitrate, levamisole, mitotane, hydroxyurea, octreotide, procarbazine, suramin, photodynamic compounds such as methoxsalen and sodium porfimer;
   [4508] (xxiv) proteasome inhibitors such as bortezomib;
   [4509] (xxv) molecular targeted therapy agents including: functional therapeutic agents, including gene therapy agents and antisense therapy agents;
   [4510] (xxvi) tyrosine kinase inhibitors such as erlotinib hydrochloride, gefitinib, imatinib mesylate, and semaxanib;
   [4511] (xxvii) Raf inhibitors such as sorafenib, and gene expression modulators such as the retinoids and rexinoids, for example adapalene, bexarotene, trans-retinoic acid, 9-cis-retinoic acid, and N-(4-hydroxyphenyl)retinamide;
   [4512] (xxviii) phenotype-directed therapy agents, including monoclonal antibodies such as pembrolizumab, alemtuzumab, bevacizumab, cetuximab, ibritumomab tiuxetan, rituximab, and trastuzumab, immunotoxins such as gemtuzumab ozogamicin, radioimmunoconjugates such as I-tositumobab;
   [4513] (xxix) cancer vaccines;
   [4514] (xxx) biologic therapy agents including: interferons such as interferon-[alpha]2a and interferon-[alpha]2b, and interleukins such as aldesleukin, denileukin diftitox, and oprelvekin; (xxxi) anticancer therapies involving the use of protective or adjunctive agents, including: cytoprotective agents such as amifostine, and dexrazoxane, phosphonates such as pamidronate and zoledronic acid, and stimulating factors such as epoetin, darbeopetin, filgrastim, PEG-filgrastim, and sargramostim;
   [4515] (xxxii) Axl inhibitors such as 1-(6,7-dihydro-5H-benzo[6,7]cyclohepta[1,2-c]pyridazin-3-yl)-N3-((7-(S)-pyrrolidin-1-yl)-6,7,8,9-tetrahydro-5H-benzo[7]annulene-2-yl)-1H-1,2,4-triazole-3,5-diamine; and/or
   [4516] (xxxiii) further combination chemotherapeutic regimens, such as combinations of carboplatin/paclitaxel, capecitabine/docetaxel, fluorauracil/levamisole, fluorauracil/leucovorin, methotrexate/leucovorin, and trastuzumab/paclitaxel, alone or in further combination with carboplatin.
[4517] 128. A method according to statement 126, wherein the further cancer treatment is a monoclonal antibody such as pembrolizumab, alemtuzumab, bevacizumab, cetuximab, ibritumomab tiuxetan, or rituximab, or is a B-Raf inhibitor such as debrafenib, a MEK inhibitor such as trametinib or a combination therapy of these agents.
[4518] 129. A method according to statement 128, wherein the further cancer treatment is pembrolizumab.
[4519] 130. A method according to statement 128, wherein the further cancer treatment is a combination therapy of debrafenib and trametinib.
[4520] 131. A method according to any one of statements 101-130, wherein the subject is mammalian.
[4521] 132. A method according to statement 131, wherein the subject is human.
[4522] 133. A method according to any one of statements 101-132, wherein the predictive method is performed before the subject receives a treatment or course of treatment for non-small cell lung cancer (NSCLC) or melanoma.
[4523] 134. A method according to any one of statement 101-133, wherein the predictive method is performed during or after a treatment or course of treatment for non-small cell lung cancer (NSCLC) or melanoma.
[4524] 135. A method according to any one of statements 101-132 or 134, wherein the subject has previously been treated with an agent capable of inhibiting or reversing EMT or a chemotherapeutic agent.
[4525] 136. A method according to statement 135, wherein the subject has previously been treated with an agent selected from: a PHGDH inhibitor, a Slfn11 inhibitor, an Axl inhibitor, or an Akt3 inhibitor.
[4526] 137. A method according to any one of statements 135-136, wherein the subject has previously been treated with an agent that is different to the agent capable of inhibiting or reversing EMT or chemotherapeutic agent for which the subject's susceptibility is being predicted.
[4527] 138. A method according to any one of statements 101-133, wherein the subject has not previously been treated with an agent capable of inhibiting or reversing EMT or a chemotherapeutic agent.
[4528] 139. A method according to statement 138, wherein the subject has not previously been treated with an Axl inhibitor.
[4529] 140. A method according to statement 138, wherein the subject has not previously been treated with an Akt3 inhibitor.
[4530] 141. A method according to any one of statements 101-140, wherein the sample is selected from: blood, serum, plasma, tissue biopsy, culture supernatant, or urine.
[4531] 142. A method according to statement 141, wherein the sample is a blood, serum, or plasma sample.
[4532] 143. A method according to statement 142, wherein the sample is a serum sample.
[4533] 144. A method according to statement 142, wherein the sample is a blood sample.
[4534] 201. A method of selecting subjects having, suspected of having, or diagnosed with non-small cell lung cancer (NSCLC) or melanoma for treatment with an agent capable of inhibiting or reversing EMT or a chemotherapeutic agent, the method comprising:
   [4535] identifying subjects susceptible to treatment with an agent capable of inhibiting or reversing EMT or a chemotherapeutic agent using a method according to any one of statements 101-144; and
   [4536] selecting thus identified subjects for treatment.
[4537] 202. A method according to statement 201, wherein treatment comprises administering to the subject a therapeutically effective amount of an agent capable of inhibiting or reversing EMT or a chemotherapeutic agent.
[4538] 203. A method according to statement 202, wherein the treatment comprises an Axl inhibitor, Akt3 inhibitor, Slfn11 inhibitor, or PHGDH inhibitor.
[4539] 204. A method according to statement 203, wherein the treatment comprises an Axl inhibitor.
[4540] 205. A method according to statement 204, wherein the Axl inhibitor is BGB324/R428/bemcentinib, cabozantinib, TP-0903, foretinib, merestinib, bosutinib, gilteritinib, crizotinib, amuvatinib, sunitinib, sitravatinib, LDC1267, UNC2025, or an anti-Axl antibody described in WO2015/193428, WO2015/193430, WO2016/097370, or WO2016/166296.
[4541] 206. A method according to statement 205, wherein the Axl inhibitor is BGB324/R428/bemcentinib.
[4542] 207. A method according to statement 205, wherein the Axl inhibitor is an anti-Axl antibody described in WO2015/193428, WO2015/193430, WO2016/097370, or WO2016/166296.
[4543] 208. A method according to statement 203, wherein the treatment comprises an Akt3 inhibitor.
[4544] 209. A method according to statement 208, wherein the Akt3 inhibitor is an Akt3 inhibitor disclosed in WO2016/102672.
[4545] 210. A method according to any one of statements 202-209, wherein the treatment is administered as a single agent.
[4546] 211. A method according to any one of statements 202-209, wherein the treatment is administered in combination with a further cancer treatment.
[4547] 212. A method according to statement 211, wherein the further cancer treatment is selected from the further cancer treatments listed in statement 126.
[4548] 213. A method according to statement 211, wherein the further cancer treatment is a monoclonal antibody such as pembrolizumab, alemtuzumab, bevacizumab, cetuximab, ibritumomab tiuxetan, or rituximab, or is a B-Raf inhibitor such as debrafenib, a MEK inhibitor such as trametinib or a combination therapy of these agents.
[4549] 214. A method according to statement 213, wherein the further cancer treatment is pembrolizumab.
[4550] 215. A method according to statement 213, wherein the further cancer treatment is a combination therapy of debrafenib and trametinib.
[4551] 301. A diagnostic kit comprising a reagent for detecting the activity, expression, or amount of an LDH biomarker, which reagent for detecting is selective for LDH.
[4552] 302. A test device comprising a reagent for detecting the activity, expression, or amount of an LDH biomarker, which reagent is selective for LDH.
[4553] 303. A diagnostic kit or test device according to any one of statements 301 or 302, comprising:
   [4554] a specific binding member which selectively binds to an LDH biomarker; and
   [4555] one or more reagents for detecting said specific binding member, or one or more reagents for detecting and/or quantifying formation of a complex formed by said specific binding member and said LDH biomarker.
[4556] 304. A diagnostic kit or test device according to statement 303, wherein the specific binding member comprises an antibody molecule or binding fragment thereof.
[4557] 305. A diagnostic kit or test device according to statement 303 or 304, wherein detecting formation of a complex formed by the specific binding member and the biomarker is carried out by use of a technique selected from: Western blot; enzyme-linked immunosorbent assay (ELISA); radioimmunoassay (RIA); competitive enzyme immunoassay; double antibody sandwich ELISA (DAS-ELISA); liquid immunoarray technology; immunocytochemistry; immunohistochemistry; antibody microarray detection; precipitation of colloidal gold; affinity chromatography; ligand binding assay; and lectin binding assay.
[4558] 306. A diagnostic kit or test device according to any one of statements 301-305, wherein the kit or test device comprises no more than 2, 5, 10, 15, 20, 25, 30, 40, or 50 reagents for detecting.
[4559] 307. A diagnostic kit or test device according to any one of statements 301-306 for use in a method of predicting a cancer-related outcome in a subject.
[4560] 308. A diagnostic kit for use, or test device for use, according to statement 307, wherein the cancer-related outcome is susceptibility to treatment with an agent capable of inhibiting or reversing EMT or a chemotherapeutic agent.
[4561] 309. A diagnostic kit for use, or test device for use, according to statement 308, wherein the agent capable of inhibiting or reversing EMT or chemotherapeutic agent is an Axl inhibitor, Akt3 inhibitor, Slfn11 inhibitor, or PHGDH inhibitor.
[4562] 310. A diagnostic kit for use, or test device for use, according to statement 308, wherein the agent capable of inhibiting or reversing EMT or chemotherapeutic agent is an Axl inhibitor.
[4563] 311. A diagnostic kit for use, or test device for use, according to statement 310, wherein the Axl inhibitor is BGB324/R428/bemcentinib, cabozantinib, TP-0903, foretinib, merestinib, bosutinib, gilteritinib, crizotinib, amuvatinib, sunitinib, sitravatinib, LDC1267, UNC2025, or an anti-Axl antibody described in WO2015/193428, WO2015/193430, WO2016/097370, or WO2016/166296.
[4564] 312. A diagnostic kit for use, or test device for use, according to statement 311, wherein the Axl inhibitor is BGB324/R428/bemcentinib.
[4565] 313. A diagnostic kit for use, or test device for use, according to statement 311, wherein the Axl inhibitor is an anti-Axl antibody described in WO2015/193428, WO2015/193430, WO2016/097370, or WO2016/166296.
[4566] 314. A diagnostic kit for use, or test device for use, according to statement 308, wherein the agent capable of inhibiting or reversing EMT or chemotherapeutic agent is an Akt3 inhibitor.
[4567] 315. A diagnostic kit for use, or test device for use, according to any one of statements 307-310, wherein the subject has, is suspected of having, or has been diagnosed with non-small cell lung cancer (NSCLC) or melanoma.
[4568] 316. A diagnostic kit for use, or test device for use, according to any one of statements 307-315, wherein the method is a method according to any one of statements 101-144.
[4569] 317. Use of a reagent for detecting the activity, expression, or amount of an LDH biomarker in a method of predicting a cancer-related outcome in a subject.
[4570] 318. Use of a reagent for detecting the activity, expression, or amount an LDH biomarker, which reagent for detecting is selective for LDH, in a method of manufacture of a diagnostic kit or test device for use in a method of predicting a cancer-related outcome in a subject.
[4571] 319. A use according to statement 317 or 318, wherein the reagent for detecting comprises a specific binding member selective for an LDH biomarker.
[4572] 320. A use according to statement 317 or 318, wherein the method of predicting a cancer-related outcome in a subject is a method according to any one of statements 101-144.
[4573] 401. Use of LDH as a biomarker for determining if a subject is susceptible to treatment with an agent capable of inhibiting or reversing EMT or a chemotherapeutic agent.
[4574] 402. A use according to statement 401, wherein:
   [4575] (i) a higher activity, expression, or amount of said LDH biomarker in the subject, or sample derived from the subject, compared with a control profile for the respective biomarker is indicative of susceptibility to treatment with an agent capable of inhibiting or reversing EMT or a chemotherapeutic agent; or
   [4576] (ii) a lower activity, expression, or amount of said LDH biomarker in the subject, or sample derived from the subject, compared with a control profile for the respective biomarker is indicative of susceptibility to treatment with an agent capable of inhibiting or reversing EMT or a chemotherapeutic agent.
[4577] 403. A use according to any one of statements 401-402, wherein the use is as a biomarker in a method according to any one of statements 101-144.
[4578] 501. A method of treating a subject having, suspected of having, or diagnosed with non-small cell lung cancer (NSCLC) or melanoma, the method comprising:
   [4579] identifying a subject susceptible to treatment using a method according to any one of statements 101-144; and
   [4580] administering to the subject a therapeutically effective amount of an agent capable of inhibiting or reversing EMT or a chemotherapeutic agent.
[4581] 502. A method of treating a subject having, suspected of having, or diagnosed with non-small cell lung cancer (NSCLC) or melanoma, the method comprising:
   [4582] (a) obtaining a sample from the subject;
   [4583] (b) determining if the subject is susceptible to treatment with an agent capable of inhibiting or reversing EMT or a chemotherapeutic agent using a method according to any one of statements 101-144;
   [4584] (c) administering to the subject a therapeutically effective amount of an agent capable of inhibiting or reversing EMT or a chemotherapeutic agent.
[4585] 503. A method of treating a subject having, suspected of having, or diagnosed with non-small cell lung cancer (NSCLC) or melanoma, the method comprising administering a therapeutically effective amount of an agent capable of inhibiting or reversing EMT or chemotherapeutic agent to a subject identified as susceptible to said treatment using a method according to any one of statements 101-144.
[4586] 504. An agent capable of inhibiting or reversing EMT or chemotherapeutic agent for use in a method of treating a subject having, suspected of having, or diagnosed with non-small cell lung cancer (NSCLC) or melanoma,
   [4587] wherein the method is a method according to any one of statements 501-503.
[4588] 505. Use of an agent capable of inhibiting or reversing EMT or chemotherapeutic agent for use in a method of manufacture of a medicament for use in a method of treating a subject having, suspected of having, or diagnosed with non-small cell lung cancer (NSCLC) or melanoma,
   [4589] wherein the method of treatment is a method according to any one of statements 501-503.
[4590] 506. A method, agent for use, or use according to any one of statements 501-505, wherein the agent capable of inhibiting or reversing EMT or chemotherapeutic agent comprises an Axl inhibitor, Akt3 inhibitor, Slfn11 inhibitor, or PHGDH inhibitor.
[4591] 507. A method, agent for use, or use according to statement 506, wherein the agent capable of inhibiting or reversing EMT or chemotherapeutic agent comprises an Axl inhibitor.
[4592] 508. A method, agent for use, or use according to statement 507, wherein the Axl inhibitor is BGB324/R428/bemcentinib, cabozantinib, TP-0903, foretinib, merestinib, bosutinib, gilteritinib, crizotinib, amuvatinib, sunitinib, sitravatinib, LDC1267, UNC2025, or an anti-Axl antibody described in WO2015/193428, WO2015/193430, WO2016/097370, or WO2016/166296.
[4593] 509. A method, agent for use, or use according to statement 507, wherein the Axl inhibitor is BGB324/R428/bemcentinib.
[4594] 510. A method, agent for use, or use according to statement 507, wherein the Axl inhibitor is an anti-Axl antibody described in WO2015/193428, WO2015/193430, WO2016/097370, or WO2016/166296.
[4595] 511. A method, agent for use, or use according to statement 506, wherein the agent capable of inhibiting or reversing EMT or chemotherapeutic agent comprises an Akt3 inhibitor.
[4596] 512. A method, agent for use, or use according to statement 511, wherein the Akt3 inhibitor is an Akt3 inhibitor disclosed in WO2016/102672.
[4597] 513. A method, agent for use, or use according to any one of statements 501-512, wherein the agent capable of inhibiting or reversing EMT or chemotherapeutic agent is administered as a single agent.
[4598] 514. A method, agent for use, or use according to any one of statements 501-512, wherein the agent capable of inhibiting or reversing EMT or chemotherapeutic agent is administered in combination with a further cancer treatment.
[4599] 515. A method, agent for use, or use according to statement 514, wherein the further cancer treatment is selected from the further cancer treatments listed in statement 126.
[4600] 516. A method, agent for use, or use according to statement 514, wherein the further cancer treatment is a monoclonal antibody such as pembrolizumab, alemtuzumab, bevacizumab, cetuximab, ibritumomab tiuxetan, or rituximab, or is a B-Raf inhibitor such as debrafenib, a MEK inhibitor such as trametinib or a combination therapy of these agents.
[4601] 517. A method, agent for use, or use according to statement 516, wherein the further cancer treatment is pembrolizumab.
[4602] 518. A method, agent for use, or use according to statement 516, wherein the further cancer treatment is a combination therapy of debrafenib and trametinib.

[4603] The features disclosed in the foregoing description, or in the following claims, or in the accompanying drawings, expressed in their specific forms or in terms of a means for performing the disclosed function, or a method or process for obtaining the disclosed results, as appropriate, may, separately, or in any combination of such features, be utilised for realising the disclosure in diverse forms thereof.

[4604] While the disclosure has been described in conjunction with the exemplary embodiments described above, many equivalent modifications and variations will be apparent to those skilled in the art when given this disclosure. Accordingly, the exemplary embodiments of the disclosure set forth above are considered to be illustrative and not limiting. Various changes to the described embodiments may be made without departing from the spirit and scope of the disclosure.

[4605] For the avoidance of any doubt, any theoretical explanations provided herein are provided for the purposes of improving the understanding of a reader. The authors do not wish to be bound by any of these theoretical explanations.

[4606] Any section headings used herein are for organizational purposes only and are not to be construed as limiting the subject matter described.

[4607] Throughout this specification, including the claims which follow, unless the context requires otherwise, the word “comprise” and “include”, and variations such as “comprises”, “comprising”, and “including” will be understood to imply the inclusion of a stated integer or step or group of integers or steps but not the exclusion of any other integer or step or group of integers or steps.

[4608] It must be noted that, as used in the specification and the appended claims, the singular forms “a,” “an,” and “the” include plural referents unless the context clearly dictates otherwise. Ranges may be expressed herein as from “about” one particular value, and/or to “about” another particular value. When such a range is expressed, another embodiment includes from the one particular value and/or to the other particular value. Similarly, when values are expressed as approximations, by the use of the antecedent “about,” it will be understood that the particular value forms another embodiment. The term “about” in relation to a numerical value is optional and means for example +/−10%.

### EXAMPLES

[4609] Serum samples were obtained from cohorts of cancer patients both before and once after these subjects were administered a drug treatment of Axl inhibitor, either alone or in combination with another agent. Subjects in these cohorts were categorised as either “responders” or “non-responders” based on response to the administered treatment.

[4610] Subsequently, the serum samples were analysed by a contract research organization (CRO) using the DiscoveryMAP v 3.3 soluble protein panel to measure the levels of soluble protein markers (281 proteins in total) in serum samples, and statistical analysis of this protein panel data was performed to identify differentially expressed proteins in the responder and non-responder groups.

[4611] In these comparative analyses pre-treatment (C1D1) differences in protein panel data were identified between responder and non-responder groups: prior to treatment certain biomarkers are present in the serum of “responder” subjects at higher levels than in the serum of “non-responder” subjects. Similarly, prior to treatment certain biomarkers are present in the serum of “responder” subjects at lower levels than in the serum of “non-responder” subjects.

[4612] Thus, the present authors have identified multiple serum based soluble protein biomarkers that are predictive of patient benefit following treatment with Axl inhibitors.

### Example 1

[4613] This example describes the results from analyses of trial BGBC003 (NCT02488408), which consists of samples from patients diagnosed with Acute Myeloid Leukaemia (AML) and Myelodysplastic Syndrome (MDS). Subjects were administered the Axl inhibitor BGB324 either as a single agent or in combination with cytarabine or decitabine.

[4614] The protein panel dataset was split into two subsets, one subset with only AML samples, and another with only MDS samples. Pre-treatment (C1D1) differences in protein expression were identified between responder and non-responder groups by statistical analysis of the protein panel data.

[4615] A first analysis identified Axl as a biomarker which was significantly down-regulated in responders as compared with non-responders prior to treatment with Axl inhibitor (p=0.006), and found that Axl levels increase in responders but not non-responders following treatment with an Axl inhibitor.

[4616] A subsequent analysis identified a further 12 proteins in the AML subset as significantly different (p<0.05) between responders and non-responders in the pre-treatment samples (log FC=Log 2 fold change of the protein; a positive value indicates up regulation, while a negative value indicates down regulation in the comparison of interest):

| | | | P. | adj. | |
|---|---|---|---|---|---|
| Biomarker ID | FC | logFC | Value | P. Val | |
| Haptoglobin | 6.973 | 2.802 | 0.009401 | 0.9861 | up |
| Fibroblast Growth | −4.877 | −2.286 | 0.0148 | 0.9861 | down |
| Factor 21 (FGF-21) | | | | | |
| Receptor for advanced | −2.676 | −1.42 | 0.01642 | 0.9861 | down |
| glycosylation end | | | | | |
| products (RAGE) | | | | | |
| Carcinoembryonic | −2.147 | −1.102 | 0.01764 | 0.9861 | down |
| Antigen (CEA) | | | | | |
| Follicle-Stimulating | −2.818 | −1.495 | 0.02104 | 0.9861 | down |
| Hormone (FSH) | | | | | |
| Matrix | −1.881 | −0.911 | 0.02581 | 0.9861 | down |
| Metalloproteinase-10 | | | | | |
| (MMP-10) | | | | | |
| Neutrophil Activating | 3.271 | 1.71 | 0.03312 | 0.9861 | up |
| Peptide 2 (NAP-2) | | | | | |
| Immunoglobulin | 2.611 | 1.385 | 0.03414 | 0.9861 | up |
| E (IgE) | | | | | |
| Omentin | −1.795 | −0.844 | 0.03658 | 0.9861 | down |
| CD40 Ligand | 2.877 | 1.525 | 0.04076 | 0.9861 | up |
| (CD40-L) | | | | | |
| Cancer Antigen | −5.153 | −2.365 | 0.04178 | 0.9861 | down |
| 19-9 (CA-19-9) | | | | | |
| Luteinizing | −2.136 | −1.095 | 0.04562 | 0.9861 | down |
| Hormone (LH) | | | | | |

[4617] 16 proteins were identified in the MDS subset as significantly different (p<0.05) between responders and non-responders in the pre-treatment samples (log FC=Log 2 fold change of the protein; a positive value indicates up regulation, while a negative value indicates down regulation in the comparison of interest):

| | | | P. | adj. | |
|---|---|---|---|---|---|
| Biomarker ID | FC | logFC | Value | P. Val | |
| Tamm-Horsfall Urinary | 4.949 | 2.307 | 0.0001461 | 0.04106 | up |
| Glycoprotein (THP) | | | | | |
| TNF-Related Apoptosis- | 3.139 | 1.65 | 0.0003568 | 0.05013 | up |
| Inducing Ligand | | | | | |
| Receptor 3 (TRAIL-R3) | | | | | |
| Transferrin receptor | −4.02 | −2.007 | 0.00185 | 0.1733 | down |
| protein 1 | | | | | |
| FASLG Receptor (FAS) | −3.503 | −1.809 | 0.005781 | 0.4061 | down |
| Macrophage-Derived | 4.945 | 2.306 | 0.007458 | 0.4191 | up |
| Chemokine | | | | | |
| Antileukoproteinase | 1.406 | 0.491 | 0.01516 | 0.6529 | up |
| (ALP) | | | | | |
| Trefoil Factor | 2.292 | 1.196 | 0.01626 | 0.6529 | up |
| 3 (TFF3) | | | | | |
| Fatty Acid-Binding | 2.543 | 1.347 | 0.02218 | 0.6569 | up |
| Protein, adipocyte | | | | | |
| (FABP, adipocyte) | | | | | |
| von Willebrand | 4.858 | 2.28 | 0.02423 | 0.6569 | up |
| Factor (vWF) | | | | | |
| Vitamin D-Binding | 1.82 | 0.864 | 0.0248 | 0.6569 | up |
| Protein (VDBP) | | | | | |
| Cystatin-B | 1.618 | 0.694 | 0.02571 | 0.6569 | up |
| Uteroglobin | 3.804 | 1.927 | 0.03509 | 0.8217 | up |
| Fibrinogen | 1.679 | 0.748 | 0.03906 | 0.8374 | up |
| Interleukin-8 (IL-8) | −6.695 | −2.743 | 0.04371 | 0.8374 | down |
| EGFR | 1.283 | 0.36 | 0.0493 | 0.8374 | up |
| Leptin | 4.473 | 2.161 | 0.04959 | 0.8374 | up |

[4618] 7 proteins were identified in the combined (AML and MDS) set as significantly different (p<0.05) between responders and non-responders in the pre-treatment samples (log FC=Log 2 fold change of the protein; a positive value indicates up regulation, while a negative value indicates down regulation in the comparison of interest):

| | | | P. | adj. | |
|---|---|---|---|---|---|
| Biomarker ID | FC | logFC | Value | P. Val | |
| Tamm-Horsfall Urinary | 1.841 | 0.88 | 0.0113 | 0.99650 | up |
| Glycoprotein (THP) | | | | | |
| Fibroblast Growth | −3.226 | −1.69 | 0.0164 | 0.99650 | down |
| Factor 21 (FGF-21) | | | | | |
| Matrix | −1.753 | −0.81 | 0.0190 | 0.99650 | down |
| Metalloproteinase-10 | | | | | |
| (MMP-10) | | | | | |
| Transferrin receptor | −1.757 | −0.813 | 0.0207 | 0.99650 | down |
| protein 1 (TFR1) | | | | | |
| Hemopexin | 1.307 | 0.386 | 0.0420 | 0.99650 | up |
| Haptoglobin | 6.34 | 2.664 | 0.0456 | 0.99650 | up |
| Immunoglobulin | 2.284 | 1.192 | 0.0499 | 0.99650 | up |
| M (IgM) | | | | | |

### Example 2

[4619] This example describes the results from analysis of trial BGBIL006 (NCT02872259), which consists of samples from patients diagnosed with melanoma. Subjects were administered the Axl inhibitor BGB324 in combination with either pembrolizumab or dabrafenib and trametinib.

[4620] 14 proteins were identified as significantly different (p<0.05) between responders and non-responders in the pre-treatment samples (log FC=Log 2 fold change of the protein; a positive value indicates up regulation, while a negative value indicates down regulation in the comparison of interest):

| | | | P. | adj. | |
|---|---|---|---|---|---|
| Biomarker ID | FC | logFC | Value | P. Val | |
| Interleukin-6 receptor | −1.492 | −0.577 | 0.001992 | 0.5598 | down |
| (IL-6r) | | | | | |
| Tissue Inhibitor of | 1.451 | 0.537 | 0.007126 | 0.6736 | up |
| Metalloproteinases | | | | | |
| 1 (TIMP-1) | | | | | |
| Heparin-Binding EGF- | 1.472 | 0.558 | 0.01055 | 0.6736 | up |
| Like Growth Factor | | | | | |
| (HB-EGF) | | | | | |
| Antileukoproteinase | 1.253 | 0.325 | 0.01084 | 0.6736 | up |
| (ALP) | | | | | |
| Latency-Associated | 1.827 | 0.869 | 0.01222 | 0.6736 | up |
| Peptide of Transforming | | | | | |
| Growth Factor beta | | | | | |
| 1 (LAP TGF-b1) | | | | | |
| Epidermal Growth | 2.115 | 1.081 | 0.01656 | 0.6736 | up |
| Factor (EGF) | | | | | |
| Platelet-Derived Growth | 2.299 | 1.201 | 0.01726 | 0.6736 | up |
| Factor BB (PDGF-BB) | | | | | |
| Osteoprotegerin (OPG) | 1.502 | 0.587 | 0.01918 | 0.6736 | up |
| Neutrophil Activating | 1.67 | 0.74 | 0.02807 | 0.7262 | up |
| Peptide 2 (NAP-2) | | | | | |
| Chemokine CC-4 | −1.407 | −0.493 | 0.02965 | 0.7262 | down |
| (HCC-4) | | | | | |
| ST2 | 1.721 | 0.783 | 0.03301 | 0.7262 | up |
| Tumor Necrosis Factor | 1.556 | 0.638 | 0.03657 | 0.7262 | up |
| Receptor I (TNF RI) | | | | | |
| Vascular Endothelial | 1.862 | 0.897 | 0.03698 | 0.7262 | up |
| Growth Factor (VEGF) | | | | | |
| Growth-Regulated alpha | 1.72 | 0.782 | 0.0375 | 0.7262 | up |
| protein (GRO-alpha) | | | | | |

### Example 3

[4621] This example describes the results from analysis of trial BGBC007 (NCT03184558), which consists of samples from patients diagnosed with melanoma. Subjects were administered the Axl inhibitor BGB324 in combination with pembrolizumab.

[4622] 8 proteins were identified as significantly different (p<0.05) between responders and non-responders in the pre-treatment samples (log FC=Log 2 fold change of the protein; a positive value indicates up regulation, while a negative value indicates down regulation in the comparison of interest):

| | | | P. | adj. | |
|---|---|---|---|---|---|
| Biomarker ID | FC | logFC | Value | P. Val | |
| Interleukin-23 (IL-23) | 1.699 | 0.765 | 0.006719 | 0.5822 | up |
| Folate receptor | 6.235 | 2.64 | 0.007624 | 0.5822 | up |
| gamma (FOLR3) | | | | | |
| Interleukin-6 receptor | −1.955 | −0.967 | 0.008476 | 0.5822 | down |
| subunit beta (IL-6R beta) | | | | | |
| Clusterin (CLU) | 1.596 | 0.674 | 0.009641 | 0.5822 | up |
| Intercellular Adhesion | −2.957 | −1.564 | 0.01036 | 0.5822 | down |
| Molecule 1 (ICAM-1) | | | | | |
| Fas Ligand (FasL) | 2.337 | 1.225 | 0.01244 | 0.5825 | up |
| Macrophage | −4.287 | −2.1 | 0.02594 | 1 | down |
| Inflammatory | | | | | |
| Protein-1 beta | | | | | |
| (MIP-1 beta) | | | | | |
| Periostin | −3.803 | −1.927 | 0.04617 | 1 | down |

### Example 4

[4623] This example describes the results from analysis of trial BGBC008 (NCT03184571), which consists of samples from patients diagnosed with NSCLC. Subjects were administered the Axl inhibitor BGB324 in combination with pembrolizumab.

[4624] 17 proteins were identified as significantly different (p<0.05) between responders and non-responders in the pre-treatment samples (log FC=Log 2 fold change of the protein; a positive value indicates up regulation, while a negative value indicates down regulation in the comparison of interest):

| | | | P. | adj. | |
|---|---|---|---|---|---|
| Biomarker ID | FC | logFC | Value | P. Val | |
| Neuronal Cell Adhesion | 3.919 | 1.97 | 0.0001822 | 0.05119 | up |
| Molecule (Nr-CAM) | | | | | |
| Beta Amyloid | −2.826 | −1.499 | 0.007978 | 0.6786 | down |
| 1-40 (AB-40) | | | | | |
| Sclerostin | 2.072 | 1.051 | 0.01051 | 0.6786 | up |
| Aggrecan core | −1.118 | −0.16 | 0.01283 | 0.6786 | down |
| protein (Aggrecan) | | | | | |
| Prostate-Specific | 94.617 | 6.564 | 0.01456 | 0.6786 | up |
| Antigen, Free (PSA-f) | | | | | |
| Epidermal Growth Factor | 1.404 | 0.49 | 0.01939 | 0.6786 | up |
| Receptor (EGFR) | | | | | |
| Neurofilament heavy | 2.653 | 1.408 | 0.02215 | 0.6786 | up |
| polypeptide (NF-H) | | | | | |
| Ferritin (FRTN) | −8.136 | −3.024 | 0.0224 | 0.6786 | down |
| Receptor for advanced | −9.265 | −3.212 | 0.02571 | 0.6786 | down |
| glycosylation end | | | | | |
| products (RAGE) | | | | | |
| Dopamine beta- | 4.841 | 2.275 | 0.02934 | 0.6786 | up |
| hydroxylase (DBH) | | | | | |
| Fibulin-1C (Fib-1C) | 2.492 | 1.317 | 0.02939 | 0.6786 | up |
| Myoglobin | 4.394 | 2.135 | 0.03025 | 0.6786 | up |
| Urokinase-type | 1.631 | 0.706 | 0.03318 | 0.6786 | up |
| Plasminogen | | | | | |
| Activator (uPA) | | | | | |
| Visceral adipose tissue - | 3.013 | 1.591 | 0.03489 | 0.6786 | up |
| derived serpin | | | | | |
| A12 (Vaspin) | | | | | |
| Interleukin-23 (IL-23) | 1.467 | 0.553 | 0.03623 | 0.6786 | up |
| Alpha-2-Macroglobulin | 1.467 | 0.553 | 0.03879 | 0.6813 | up |
| (A2Macro) | | | | | |
| Tissue Inhibitor of | 1.139 | 0.188 | 0.04656 | 0.7696 | up |
| Metalloproteinases | | | | | |
| 2 (TIMP-2) | | | | | |

### Example 5

[4625] This example describes the results from analysis of trial BGBIL005 (NCT02922777), which consists of samples from patients diagnosed with NSCLC. Subjects were administered the Axl inhibitor BGB324 in combination with docetaxel.

[4626] 8 proteins were identified as significantly different (p<0.05) between responders and non-responders in the pre-treatment samples (log FC=Log 2 fold change of the protein; a positive value indicates up regulation, while a negative value indicates down regulation in the comparison of interest):

| | | | P. | adj. | |
|---|---|---|---|---|---|
| Biomarker ID | FC | logFC | Value | P. Val | |
| Myeloid Progenitor | 2.515 | 1.33 | 0.0004716 | 0.1325 | up |
| Inhibitory Factor 1 | | | | | |
| (MPIF-1) | | | | | |
| Pancreatic | 5.255 | 2.394 | 0.01592 | 1 | up |
| Polypeptide (PPP) | | | | | |
| Visceral adipose tissue - | 5.786 | 2.533 | 0.02239 | 1 | up |
| derived serpin | | | | | |
| A12 (Vaspin) | | | | | |
| Thyroid-Stimulating | −4.362 | −2.125 | 0.02275 | 1 | down |
| Hormone | | | | | |
| Interleukin-7 (IL-7) | 1.254 | 0.327 | 0.03036 | 1 | up |
| Pulmonary and | 1.57 | 0.651 | 0.03059 | 1 | up |
| Activation-Regulated | | | | | |
| Chemokine (PARC) | | | | | |
| Cancer Antigen | 4.86 | 2.281 | 0.03891 | 1 | up |
| 15-3 (CA-15-3) | | | | | |
| Tetranectin | −1.294 | −0.372 | 0.04522 | 1 | down |

### Example 6

[4627] This example describes the results from analysis of trial BGBC004 (NCT02424617), which consists of samples from patients diagnosed with NSCLC. Subjects were administered the Axl inhibitor BGB324 in combination with erlotinib.

[4628] 9 proteins were identified as significantly different (p<0.05) between responders and non-responders in the pre-treatment samples (log FC=Log 2 fold change of the protein; a positive value indicates up regulation, while a negative value indicates down regulation in the comparison of interest):

| | | | P. | adj. | |
|---|---|---|---|---|---|
| Biomarker ID | FC | logFC | Value | P. Val | |
| Pepsinogen I (PGI) | −2.029 | −1.021 | 0.002814 | 0.7907 | down |
| Apolipoprotein E | −2.524 | −1.336 | 0.006299 | 0.8575 | down |
| (Apo E) | | | | | |
| Apolipoprotein C-I | −1.381 | −0.466 | 0.01258 | 0.8575 | down |
| (Apo C-I) | | | | | |
| Vitamin D-Binding | 1.795 | 0.844 | 0.01442 | 0.8575 | up |
| Protein (VDBP) | | | | | |
| Macrophage-Stimulating | −2.406 | −1.267 | 0.01756 | 0.8575 | down |
| Protein | | | | | |
| C-C motif chemokine | −1.904 | −0.929 | 0.02042 | 0.8575 | down |
| 15 (CCL15) | | | | | |
| Progranulin | −1.78 | −0.832 | 0.023 | 0.8575 | down |
| Carcinoembryonic | −1.772 | −0.825 | 0.02441 | 0.8575 | down |
| antigen-related cell | | | | | |
| adhesion molecule | | | | | |
| 1 (CEACAM1) | | | | | |
| Carbonic anhydrase | 1.878 | 0.909 | 0.03379 | 0.9893 | up |
| 9 (CA-9) | | | | | |

### Example 7

[4629] This example describes the results from analysis of trial BGBIL006 (NCT02872259), which consists of samples from patients diagnosed with melanoma, and trial BGBC008 (NCT03184571), which consists of samples from patients diagnosed with NSCLC. Subjects were administered the Axl inhibitor BGB324 in combination with either pembrolizumab or dabrafenib and trametinib.

[4630] Samples from a total of 29 patients were collected and analysed (7 from NCT02872259 and 22 from NCT03184571). Pre-treatment levels of the blood-based biomarker Lactate Dehydrogenase (LDH) were measured by clinical laboratories as part of the clinical trial screening process, and entered into the electronic case report form (eCRF). Subjects were administered the Axl inhibitor BGB324 in combination with either pembrolizumab or dabrafenib and trametinib, and the response was measured by RECIST (Response Evaluation Criteria in Solid Tumors) criteria.

[4631] LDH protein was found to be significantly different between responders and non-responders in the pre-treatment samples. Using a preliminary cut-off of 287 units per litre (U/L), patients can be classified as responders and non-responders with a test accuracy of 79%. A “normal” LDH level is considered to be between 115-255 U/L:

| | Screen | | | | | | | | |
|---|---|---|---|---|---|---|---|---|---|
| | LDH | | Test | Correct | True | False | True | False | LDH |
| ID | Levels | Responder | Result | Call | Responder | Responder | NR | NR | cutoff |
| 233003 | 135 | No | No | TRUE | | | TNR | | 287 |
| 232004 | 148 | No | No | TRUE | | | TNR | | |
| 233001 | 159 | No | No | TRUE | | | TNR | | |
| 01-006 | 162 | No | No | TRUE | | | TNR | | |
| 236001 | 189 | No | No | TRUE | | | TNR | | |
| 236003 | 192 | No | No | TRUE | | | TNR | | |
| 232003 | 205 | No | No | TRUE | | | TNR | | |
| 221003 | 209 | No | No | TRUE | | | TNR | | |
| 01-020 | 209 | No | No | TRUE | | | TNR | | |
| 01-012 | 233 | No | No | TRUE | | | TNR | | |
| 01-017 | 234 | Yes | No | FALSE | | | | FNR | |
| 201001 | 241 | No | No | TRUE | | | TNR | | |
| 01-016 | 246 | No | No | TRUE | | | TNR | | |
| 211001 | 250 | No | No | TRUE | | | TNR | | |
| 234004 | 264 | No | No | TRUE | | | TNR | | |
| 221001 | 274 | No | No | TRUE | | | TNR | | |
| 234002 | 277 | No | No | TRUE | | | TNR | | |
| 212002 | 277 | No | No | TRUE | | | TNR | | |
| 01-010 | 288 | Yes | Yes | TRUE | TR | | | | |
| 237002 | 298 | Yes | Yes | TRUE | TR | | | | |
| 212005 | 351 | Yes | Yes | TRUE | TR | | | | |
| 01-003 | 381 | No | Yes | FALSE | | FR | | | |
| 234006 | 402 | No | Yes | FALSE | | FR | | | |
| 212001 | 409 | Yes | Yes | TRUE | TR | | | | |
| 234005 | 461 | Yes | Yes | TRUE | TR | | | | |
| 237001 | 463 | Yes | Yes | TRUE | TR | | | | |
| 234003 | 482 | No | Yes | FALSE | | FR | | | |
| 234007 | 669 | No | Yes | FALSE | | FR | | | |
| 231001 | 828 | No | Yes | FALSE | | FR | | | |
| | | | | | 6 | 5 | 17 | 1 | |

| | | |
|---|---|---|
| True | No correctly identified | 6 |
| Responder | as responder | |
| False | No incorrectly identified | 5 |
| Responder | as responder | |
| True Non | No correctly identified | 17 |
| Responder | as non responder | |
| False Non | No incorrectly identified | 1 |
| Responder | as non responder | |

| | | |
|---|---|---|
| Accuracy | 79% | Overall accuracy of test |
| Sensitivity | 86% | Probability test result will be Responder when a Responder is |
| | | tested |
| Specificity | 77% | Probability test result will be Non Responder when a Non |
| | | Responder is tested |
| NPV | 94% | Probability that the patient is a Non Responder when the test |
| | | gives a Non Responder Result |
| PPV | 55% | Probability that the patient is a Responder when the test gives |
| | | a Responder Result |

[4632] In addition, data was analysed from trial BGBIL006 (NCT02872259) to investigate the correlation between pre-treatment LDH levels and increase/decrease in tumour size following treatment with BGB324 and pembrolizumab. The results of this analysis are shown in FIG. 1.

### Example 8

[4633] This example describes the results from further analyses of data from trial BGBC003 (NCT02488408), which consists of samples from patients diagnosed with Acute Myeloid Leukaemia (AML) and Myelodysplastic Syndrome (MDS). Subjects were administered the Axl inhibitor BGB324 either as a single agent or in combination with cytarabine or decitabine.

[4634] The protein panel dataset was split into two subsets, one subset with only AML samples, and another with only MDS samples. Pre-treatment (C1D1) differences in protein expression were identified between responder and non-responder groups by statistical analysis of the protein panel data.

[4635] The analysis identified 10 proteins in the combined AML and MDS monotherapy subset as significantly different (p<0.05) between responders and non-responders in the pre-treatment samples (log FC=Log 2 fold change of the protein; a positive value indicates up regulation, while a negative value indicates down regulation in the comparison of interest):

| | | | P. | adj. | |
|---|---|---|---|---|---|
| Biomarker ID | FC | logFC | Value | P. Val | |
| Vitamin D-Binding Protein | 2.045 | 1.032 | 0.002 | 0.480 | up |
| Growth/differentiation | −2.006 | −1.005 | 0.016 | 0.856 | down |
| factor 15 (GDF-15) | | | | | |
| EGFR | 1.294 | 0.372 | 0.018 | 0.856 | up |
| Epithelial cell adhesion | 2.457 | 1.297 | 0.019 | 0.856 | up |
| molecule (EpCam) | | | | | |
| Tamm-Horsfall Urinary | 1.665 | 0.735 | 0.023 | 0.856 | up |
| Glycoprotein (THP) | | | | | |
| Macrophage-Stimulating | 1.605 | 0.682 | 0.025 | 0.856 | up |
| Protein | | | | | |
| Paraoxonase-1 (PON-1) | 1.660 | 0.731 | 0.036 | 0.856 | up |
| Fetuin-A | 1.268 | 0.343 | 0.040 | 0.856 | up |
| C-Peptide | −1.773 | −0.826 | 0.045 | 0.856 | down |
| Apolipoprotein A-II | 1.309 | 0.389 | 0.045 | 0.856 | up |
| (Apo A-II) | | | | | |

[4636] The analysis identified 5 proteins in the combined AML and MDS combination therapy subset as significantly different (p<0.05) between responders and non-responders in the pre-treatment samples (log FC=Log 2 fold change of the protein; a positive value indicates up regulation, while a negative value indicates down regulation in the comparison of interest):

| | | | P. | adj. | |
|---|---|---|---|---|---|
| Biomarker ID | FC | logFC | Value | P. Val | |
| Tamm-Horsfall Urinary | 1.362 | 0.446 | 0.012 | 1 | up |
| Glycoprotein (THP) | | | | | |
| Vitamin D-Binding | 1.405 | 0.490 | 0.013 | 1 | up |
| Protein (VDBP) | | | | | |
| Interleukin-6 receptor | 1.159 | 0.213 | 0.028 | 1 | up |
| subunit beta | | | | | |
| Complement Factor H - | −2.540 | −1.345 | 0.031 | 1 | down |
| Related Protein 1 (CFHR1) | | | | | |
| Epithelial cell adhesion | 1.664 | 0.734 | 0.032 | 1 | up |
| molecule (EpCam) | | | | | |

### Example 9

[4637] This example describes the results from analysis of trial BGBIL006 (NCT02872259), which consists of samples from patients diagnosed with melanoma. Subjects were administered the Axl inhibitor BGB324 in combination with either pembrolizumab or dabrafenib and trametinib.

[4638] The protein panel dataset was split into two subsets, one subset with only the pembrolizumab combination samples, and another with all patient samples. Pre-treatment (C1D1) differences in protein expression were identified between responder and non-responder groups by statistical analysis of the protein panel data.

[4639] The analysis identified 19 proteins in the pembrolizumab subset as significantly different (p<0.05) between responders and non-responders in the pre-treatment samples (log FC=Log 2 fold change of the protein; a positive value indicates up regulation, while a negative value indicates down regulation in the comparison of interest):

| | | | P. | adj. | |
|---|---|---|---|---|---|
| Biomarker ID | FC | logFC | Value | P. Val | |
| Pancreatic secretory trypsin | 1.674 | 0.743 | 0.002 | 0.290 | up |
| inhibitor (TATI) | | | | | |
| Chromogranin-A (CgA) | 2.680 | 1.422 | 0.002 | 0.290 | up |
| Matrix Metalloproteinase-7 | 2.029 | 1.020 | 0.003 | 0.290 | up |
| (MMP-7) | | | | | |
| Kidney Injury Molecule-1 | 1.625 | 0.701 | 0.011 | 0.482 | up |
| (KIM-1) | | | | | |
| Neuronal Cell Adhesion | 1.390 | 0.475 | 0.012 | 0.482 | up |
| Molecule (Nr-CAM) | | | | | |
| Leptin | 3.140 | 1.651 | 0.013 | 0.482 | up |
| Heparin-Binding EGF-Like | 1.500 | 0.583 | 0.013 | 0.482 | up |
| Growth Factor (HB-EGF) | | | | | |
| Apolipoprotein A-I | 1.313 | 0.393 | 0.022 | 0.602 | up |
| (Apo A-I) | | | | | |
| Periostin | −1.473 | −0.559 | 0.023 | 0.602 | down |
| Alpha-Fetoprotein (AFP) | −1.746 | −0.804 | 0.025 | 0.602 | down |
| Angiopoietin-2 (ANG-2) | 1.408 | 0.493 | 0.026 | 0.602 | up |
| Cystatin-C | 1.339 | 0.421 | 0.029 | 0.602 | up |
| CD 40 antigen (CD40) | 1.450 | 0.536 | 0.030 | 0.602 | up |
| Hepsin | 1.458 | 0.544 | 0.034 | 0.620 | up |
| Apolipoprotein C-I | 1.266 | 0.340 | 0.035 | 0.620 | up |
| (Apo C-I) | | | | | |
| Interleukin-1 receptor | 1.302 | 0.381 | 0.042 | 0.629 | up |
| type 1 (IL-1RI) | | | | | |
| Eotaxin-2 | −1.542 | −0.625 | 0.043 | 0.629 | down |
| Myeloperoxidase (MPO) | −1.646 | −0.719 | 0.046 | 0.629 | down |
| Ferritin (FRTN) | −2.186 | −1.129 | 0.046 | 0.629 | down |

[4640] The analysis identified 13 proteins in the all patient data set as significantly different (p<0.05) between responders and non-responders in the pre-treatment samples (log FC=Log 2 fold change of the protein; a positive value indicates up regulation, while a negative value indicates down regulation in the comparison of interest):

| | | | P. | adj. | |
|---|---|---|---|---|---|
| Biomarker ID | FC | logFC | Value | P. Val | |
| Heparin-Binding EGF-Like | 1.417 | 0.503 | 0.002 | 0.426 | up |
| Growth Factor (HB-EGF) | | | | | |
| Alpha-Fetoprotein (AFP) | −1.642 | −0.715 | 0.005 | 0.426 | down |
| Human Chorionic | −1.224 | −0.292 | 0.005 | 0.426 | down |
| Gonadotropin beta (hCG) | | | | | |
| Interleukin-2 receptor alpha | 1.608 | 0.685 | 0.015 | 0.801 | up |
| (IL-2 receptor alpha) | | | | | |
| Latency-Associated | 1.545 | 0.628 | 0.017 | 0.801 | up |
| Peptide of Transforming | | | | | |
| Growth Factor beta 1 | | | | | |
| (LAP TGF-b1) | | | | | |
| Thymus and activation- | 2.104 | 1.073 | 0.020 | 0.801 | up |
| regulated chemokine | | | | | |
| (TARC) | | | | | |
| Neuronal Cell Adhesion | 1.717 | 0.780 | 0.024 | 0.801 | up |
| Molecule (Nr-CAM) | | | | | |
| CD40 Ligand (CD40-L) | 1.649 | 0.721 | 0.026 | 0.801 | up |
| Kidney Injury Molecule-1 | 1.346 | 0.428 | 0.029 | 0.801 | up |
| (KIM-1) | | | | | |
| CD 40 antigen (CD40) | 1.366 | 0.450 | 0.031 | 0.801 | up |
| Chromogranin-A (CgA) | 1.627 | 0.702 | 0.035 | 0.826 | up |
| Epidermal Growth Factor | 1.731 | 0.791 | 0.041 | 0.902 | up |
| (EGF) | | | | | |
| Vascular endothelial | 1.305 | 0.384 | 0.047 | 0.938 | up |
| growth factor receptor 3 | | | | | |
| (VEGFR-3) | | | | | |

### Example 10

[4641] This example describes the results from further analysis of trial BGBC008 (NCT03184571), which consists of samples from patients diagnosed with NSCLC. Subjects were administered the Axl inhibitor BGB324 in combination with pembrolizumab.

[4642] 21 proteins were identified as significantly different (p<0.05) between responders and non-responders in the pre-treatment samples (log FC=Log 2 fold change of the protein; a positive value indicates up regulation, while a negative value indicates down regulation in the comparison of interest):

| | | | P. | adj. | |
|---|---|---|---|---|---|
| Biomarker ID | FC | logFC | Value | P. Val | |
| N-terminal | −5.742 | −2.521 | 2.01E−04 | 0.0529 | down |
| prohormone of | | | | | |
| brain natriuretic | | | | | |
| peptide (NT | | | | | |
| proBNP) | | | | | |
| Endostatin | −1.942 | −0.960 | 7.83E−04 | 0.1029 | down |
| Insulin-like Growth | −1.9352 | −0.953 | 0.006 | 0.490 | down |
| Factor-Binding | | | | | |
| Protein 2 (IGFBP-2) | | | | | |
| Vascular endothelial | −1.516 | −0.600 | 0.008 | 0.490 | down |
| growth factor D | | | | | |
| (VEGF-D) | | | | | |
| Growth/differentiation | −1.656 | −0.728 | 0.012 | 0.490 | down |
| factor 15 (GDF-15) | | | | | |
| Beta Amyloid | −1.879 | −0.910 | 0.014 | 0.490 | down |
| 1-40 (AB-40) | | | | | |
| Antileukoproteinase | −1.511 | −0.595 | 0.017 | 0.490 | down |
| (ALP) | | | | | |
| Monocyte Chemotactic | 1.694 | 0.760 | 0.019 | 0.490 | Up |
| Protein 3 (MCP-3) | | | | | |
| Superoxide Dismutase | 1.702 | 0.767 | 0.020 | 0.490 | Up |
| 1, soluble (SOD-1) | | | | | |
| Bone morphogenetic | 1.894 | 0.921 | 0.021 | 0.490 | Up |
| protein 9 (BMP-9) | | | | | |
| Interleukin-8 | 5.086 | 2.346 | 0.022 | 0.490 | Up |
| (IL-8) | | | | | |
| Macrophage | 1.984 | 0.988 | 0.022 | 0.490 | Up |
| Inflammatory | | | | | |
| Protein-1 beta | | | | | |
| (MIP-1 beta) | | | | | |
| Receptor for advanced | −1.930 | −0.949 | 0.027 | 0.549 | Down |
| glycosylation end | | | | | |
| products (RAGE) | | | | | |
| Myeloperoxidase | 2.163 | 1.113 | 0.031 | 0.578 | Up |
| (MPO) | | | | | |
| Chromogranin-A | −1.920 | −0.941 | 0.037 | 0.594 | Down |
| (CgA) | | | | | |
| HE4 | −1.649 | −0.722 | 0.041 | 0.594 | Down |
| Adrenomedullin | −1.668 | −0.738 | 0.041 | 0.594 | Down |
| (ADM) | | | | | |
| Beta-2- | −1.311 | −0.390 | 0.043 | 0.594 | Down |
| Microglobulin | | | | | |
| (B2M) | | | | | |
| Vitamin D-Binding | 1.275 | 0.351 | 0.044 | 0.594 | Down |
| Protein (VDBP) | | | | | |
| Cystatin-C | −1.248 | −0.320 | 0.045 | 0.594 | Down |
| Hepsin | −1.208 | −0.273 | 0.050 | 0.613 | Down |

### REFERENCES

[4643] A number of publications are cited above in order to more fully describe and disclose the disclosure and the state of the art to which the disclosure pertains. Full citations for these references are provided below. The entirety of each of these references is incorporated herein.
[4644] De Kouchkovsky et al, 2016, Blood Cancer J., 6(7):e441
[4645] Ben-Batalla et al, 2013, Blood, 122(14):2443-52
[4646] Burnett et al., 2011, J Clin Oncol. 29(5):487-94
[4647] Haferlach, 2008, Hematology Am Soc Hematol Educ Program, 1: 400-11
[4648] Ma et al, 2018, Medicine (Baltimore), 97(16):e0434
[4649] Hsueh et al, 2016, Exp Hematol Oncol., 5:23
[4650] Jhan et al, 2017, Pharmacogenomics, 18(17):1595-1609.
[4651] Herbst et al, 2018, Nature, 553(7689):446-454.
[4652] Zappa et al, 2016, Transl Lung Cancer Res. 5(3):288-300
[4653] WO2015/193428
[4654] WO2015/193430
[4655] WO2016/097370
[4656] WO2016/102672
[4657] WO2016/166296
[4658] For standard molecular biology techniques, see Sambrook, J., Russel, D. W. Molecular Cloning, A Laboratory Manual. 3 ed. 2001, Cold Spring Harbor, N.Y.: Cold Spring Harbor Laboratory Press

The application's sequence listing, which the Patent Office published only in electronic form, follows.

SEQUENCE LISTING (267 sequences)

SEQ ID NO: 1 - protein, 894 aa, Artificial Sequence
  Axl biomarker (UniProt: P30530-1) (entry version 196)
MAWRCPRMGRVPLAWCLALCGWACMAPRGTQAEESPFVGNPGNITGARGLTGTLRCQLQVQGEPPEVHWLRDGQILELADSTQTQVPLGEDEQDDWIVVSQLRITSLQLSDTGQYQCLVFLGHQTFVSQPGYVGLEGLPYFLEEPEDRTVAANTPFNLSCQAQGPPEPVDLLWLQDAVPLATAPGHGPQRSLHVPGLNKTSSFSCEAHNAKGVTTSRTATITVLPQQPRNLHLVSRQPTELEVAWTPGLSGIYPLTHCTLQAVLSDDGMGIQAGEPDPPEEPLTSQASVPPHQLRLGSLHPHTPYHIRVACTSSQGPSSWTHWLPVETPEGVPLGPPENISATRNGSQAFVHWQEPRAPLQGTLLGYRLAYQGQDTPEVLMDIGLRQEVTLELQGDGSVSNLTVCVAAYTAAGDGPWSLPVPLEAWRPGQAQPVHQLVKEPSTPAFSWPWWYVLLGAVVAAACVLILALFLVHRRKKETRYGEVFEPTVERGELVVRYRVRKSYSRRTTEATLNSLGISEELKEKLRDVMVDRHKVALGKTLGEGEFGAVMEGQLNQDDSILKVAVKTMKIAICTRSELEDFLSEAVCMKEFDHPNVMRLIGVCFQGSERESFPAPVVILPFMKHGDLHSFLLYSRLGDQPVYLPTQMLVKFMADIASGMEYLSTKRFIHRDLAARNCMLNENMSVCVADFGLSKKIYNGDYYRQGRIAKMPVKWIAIESLADRVYTSKSDVWSFGVTMWEIATRGQTPYPGVENSEIYDYLRQGNRLKQPADCLDGLYALMSRCWELNPQDRPSFTELREDLENTLKALPPAQEPDEILYVNMDEGGGYPEPPGAAGGADPPTQPDPKDSCSCLTAAEVHPAGRYVLCPSTTPSPAQPADRGSPAAPGQEDGA

SEQ ID NO: 2 - protein, 885 aa, Artificial Sequence
  Axl biomarker (UniProt: P30530-2)
MAWRCPRMGRVPLAWCLALCGWACMAPRGTQAEESPFVGNPGNITGARGLTGTLRCQLQVQGEPPEVHWLRDGQILELADSTQTQVPLGEDEQDDWIVVSQLRITSLQLSDTGQYQCLVFLGHQTFVSQPGYVGLEGLPYFLEEPEDRTVAANTPFNLSCQAQGPPEPVDLLWLQDAVPLATAPGHGPQRSLHVPGLNKTSSFSCEAHNAKGVTTSRTATITVLPQQPRNLHLVSRQPTELEVAWTPGLSGIYPLTHCTLQAVLSDDGMGIQAGEPDPPEEPLTSQASVPPHQLRLGSLHPHTPYHIRVACTSSQGPSSWTHWLPVETPEGVPLGPPENISATRNGSQAFVHWQEPRAPLQGTLLGYRLAYQGQDTPEVLMDIGLRQEVTLELQGDGSVSNLTVCVAAYTAAGDGPWSLPVPLEAWRPVKEPSTPAFSWPWWYVLLGAVVAAACVLILALFLVHRRKKETRYGEVFEPTVERGELVVRYRVRKSYSRRTTEATLNSLGISEELKEKLRDVMVDRHKVALGKTLGEGEFGAVMEGQLNQDDSILKVAVKTMKIAICTRSELEDFLSEAVCMKEFDHPNVMRLIGVCFQGSERESFPAPVVILPFMKHGDLHSFLLYSRLGDQPVYLPTQMLVKFMADIASGMEYLSTKRFIHRDLAARNCMLNENMSVCVADFGLSKKIYNGDYYRQGRIAKMPVKWIAIESLADRVYTSKSDVWSFGVTMWEIATRGQTPYPGVENSEIYDYLRQGNRLKQPADCLDGLYALMSRCWELNPQDRPSFTELREDLENTLKALPPAQEPDEILYVNMDEGGGYPEPPGAAGGADPPTQPDPKDSCSCLTAAEVHPAGRYVLCPSTTPSPAQPADRGSPAAPGQEDGA

SEQ ID NO: 3 - protein, 209 aa, Artificial Sequence
  FGF-21 biomarker (UniProt: Q9NSA1) (entry version 145)
MDSDETGFEHSGLWVSVLAGLLLGACQAHPIPDSSPLLQFGGQVRQRYLYTDDAQQTEAHLEIREDGTVGGAADQSPESLLQLKALKPGVIQILGVKTSRFLCQRPDGALYGSLHFDPEACSFRELLLEDGYNVYQSEAHGLPLHLPGNKSPHRDPAPRGPARFLPLPGLPPALPEPPGILAPQPPDVGSSDPLSMVGPSQGRSPSYAS

SEQ ID NO: 4 - protein, 404 aa, Artificial Sequence
  RAGE biomarker (UniProt: Q15109-1) (entry version 189)
MAAGTAVGAWVLVLSLWGAVVGAQNITARIGEPLVLKCKGAPKKPPQRLEWKLNTGRTEAWKVLSPQGGGPWDSVARVLPNGSLFLPAVGIQDEGIFRCQAMNRNGKETKSNYRVRVYQIPGKPEIVDSASELTAGVPNKVGTCVSEGSYPAGTLSWHLDGKPLVPNEKGVSVKEQTRRHPETGLFTLQSELMVTPARGGDPRPTFSCSFSPGLPRHRALRTAPIQPRVWEPVPLEEVQLVVEPEGGAVAPGGTVTLTCEVPAQPSPQIHWMKDGVPLPLPPSPVLILPEIGPQDQGTYSCVATHSSHGPQESRAVSISIIEPGEEGPTAGSVGGSGLGTLALALGILGGLGTAALLIGVILWQRRQRRGEERKAPENQEEEEERAELNQSEEPEAGESSTGGP

SEQ ID NO: 5 - protein, 342 aa, Artificial Sequence
  RAGE biomarker (UniProt: Q15109-2)
MAAGTAVGAWVLVLSLWGAVVGAQNITARIGEPLVLKCKGAPKKPPQRLEWKLGGGPWDSVARVLPNGSLFLPAVGIQDEGIFRCQAMNRNGKETKSNYRVRVYQIPGKPEIVDSASELTAGVPNKVGTCVSEGSYPAGTLSWHLDGKPLVPNEKGVSVKEQTRRHPETGLFTLQSELMVTPARGGDPRPTFSCSFSPGLPRHRALRTAPIQPRVWEPVPLEEVQLVVEPEGGAVAPGGTVTLTCEVPAQPSPQIHWMKDVSDLERGAGRTRRGGANCRLCGRIRAGNSSPGPGDPGRPGDSRPAHWGHLVAKAATPRRGEEGPRKPGGRGGACRTESVGGT

SEQ ID NO: 6 - protein, 347 aa, Artificial Sequence
  RAGE biomarker (UniProt: Q15109-3)
MAAGTAVGAWVLVLSLWGAVVGAQNITARIGEPLVLKCKGAPKKPPQRLEWKLNTGRTEAWKVLSPQGGGPWDSVARVLPNGSLFLPAVGIQDEGIFRCQAMNRNGKETKSNYRVRVYQIPGKPEIVDSASELTAGVPNKVGTCVSEGSYPAGTLSWHLDGKPLVPNEKGVSVKEQTRRHPETGLFTLQSELMVTPARGGDPRPTFSCSFSPGLPRHRALRTAPIQPRVWEPVPLEEVQLVVEPEGGAVAPGGTVTLTCEVPAQPSPQIHWMKDGVPLPLPPSPVLILPEIGPQDQGTYSCVATHSSHGPQESRAVSISIIEPGEEGPTAGEGFDKVREAEDSPQHM

SEQ ID NO: 7 - protein, 363 aa, Artificial Sequence
  RAGE biomarker (UniProt: Q15109-4)
MAAGTAVGAWVLVLSLWGAVVGAQNITARIGEPLVLKCKGAPKKPPQRLEWKLNTGRTEAWKVLSPQGGGPWDSVARVLPNGSLFLPAVGIQDEGIFRCQAMNRNGKETKSNYRVRVYQIPGKPEIVDSASELTAGVPNKVVEESRRSRKRPCEQEVGTCVSEGSYPAGTLSWHLDGKPLVPNEKGVSVKEQTRRHPETGLFTLQSELMVTPARGGDPRPTFSCSFSPGLPRHRALRTAPIQPRVWEPVPLEEVQLVVEPEGGAVAPGGTVTLTCEVPAQPSPQIHWMKDGVPLPLPPSPVLILPEIGPQDQGTYSCVATHSSHGPQESRAVSISIIEPGEEGPTAGEGFDKVREAEDSPQHM

SEQ ID NO: 8 - protein, 121 aa, Artificial Sequence
  RAGE biomarker (UniProt: Q15109-5)
MAAGTAVGAWVLVLSLWGAVVGAQNITARIGEPLVLKCKGAPKKPPQRLEWKLNTGRTEAWKVLSPQGGGPWDSVARVLPNGSLFLPAVGIQDEGIFRCQAMNRNGKETKSNWWWSQKVEQ

SEQ ID NO: 9 - protein, 420 aa, Artificial Sequence
  RAGE biomarker (UniProt: Q15109-6)
MAAGTAVGAWVLVLSLWGAVVGAQNITARIGEPLVLKCKGAPKKPPQRLEWKLNTGRTEAWKVLSPQGGGPWDSVARVLPNGSLFLPAVGIQDEGIFRCQAMNRNGKETKSNYRVRVYQIPGKPEIVDSASELTAGVPNKVVEESRRSRKRPCEQEVGTCVSEGSYPAGTLSWHLDGKPLVPNEKGVSVKEQTRRHPETGLFTLQSELMVTPARGGDPRPTFSCSFSPGLPRHRALRTAPIQPRVWEPVPLEEVQLVVEPEGGAVAPGGTVTLTCEVPAQPSPQIHWMKDGVPLPLPPSPVLILPEIGPQDQGTYSCVATHSSHGPQESRAVSISIIEPGEEGPTAGSVGGSGLGTLALALGILGGLGTAALLIGVILWQRRQRRGEERKAPENQEEEEERAELNQSEEPEAGESSTGGP

SEQ ID NO: 10 - protein, 390 aa, Artificial Sequence
  RAGE biomarker (UniProt: Q15109-7)
MAAGTAVGAWVLVLSLWGAVVGAQNITARIGEPLVLKCKGAPKKPPQRLEWKLGGGPWDSVARVLPNGSLFLPAVGIQDEGIFRCQAMNRNGKETKSNYRVRVYQIPGKPEIVDSASELTAGVPNKVGTCVSEGSYPAGTLSWHLDGKPLVPNEKGVSVKEQTRRHPETGLFTLQSELMVTPARGGDPRPTFSCSFSPGLPRHRALRTAPIQPRVWEPVPLEEVQLVVEPEGGAVAPGGTVTLTCEVPAQPSPQIHWMKDGVPLPLPPSPVLILPEIGPQDQGTYSCVATHSSHGPQESRAVSISIIEPGEEGPTAGSVGGSGLGTLALALGILGGLGTAALLIGVILWQRRQRRGEERKAPENQEEEEERAELNQSEEPEAGESSTGGP

SEQ ID NO: 11 - protein, 325 aa, Artificial Sequence
  RAGE biomarker (UniProt: Q15109-8)
MAAGTAVGAWVLVLSLWGAVVGAQNITARIGEPLVLKCKGAPKKPPQRLEWKLNTGRTEAWKVLSPQGGGPWDSVARVLPNGSLFLPAVGIQDEGIFRCQAMNRNGKETKSNYRVRVYQIPGKPEIVDSASELTAGVPNKVGTCVSEGSYPAGTLSWHLDGKPLVPNEKGVSVKEQTRRHPETGLFTLQSELMVTPARGGDPRPTFSCSFSPGLPRHRALRTAPIQPRVWEPVPLEEVQLVVEPEGGAVAPGGTVTLTCEVPAQPSPQIHWMKDNQARRGQLQVRGLIKSGKQKIAPNTCDWGDGQQERNGRPQKTRRKRRSVQN

SEQ ID NO: 12 - protein, 355 aa, Artificial Sequence
  RAGE biomarker (UniProt: Q15109-9)
MAAGTAVGAWVLVLSLWGAVVGAQNITARIGEPLVLKCKGAPKKPPQRLEWKLNTGRTEAWKVLSPQGGGPWDSVARVLPNGSLFLPAVGIQDEGIFRCQAMNRNGKETKSNYRVRVYQIPGKPEIVDSASELTAGVPNKVGTCVSEGSYPAGTLSWHLDGKPLVPNEKGVSVKEQTRRHPETGLFTLQSELMVTPARGGDPRPTFSCSFSPGLPRHRALRTAPIQPRVWEPVPLEEVQLVVEPEGGAVAPGGTVTLTCEVPAQPSPQIHWMKDGLRTREPTAVWPPIPATGPRKAVLSASASSNQARRGQLQVRGLIKSGKQKIAPNTCDWGDGQQERNGRPQKTRRKRRSVQN

SEQ ID NO: 13 - protein, 386 aa, Artificial Sequence
  RAGE biomarker (UniProt: Q15109-10)
MAAGTAVGAWVLVLSLWGAVVGAQNITARIGEPLVLKCKGAPKKPPQRLEWKLNTGRTEAWKVLSPQGGGPWDSVARVLPNGSLFLPAVGIQDEGIFRCQAMNRNGKETKSNYRVRVYQIPGKPEIVDSASELTAGVPNKVGTCVSEGSYPAGTLSWHLDGKPLVPNEKGVSVKEQTRRHPETGLFTLQSELMVTPARGGDPRPTFSCSFSPGLPRHRALRTAPIQPRVWEPVPLEEVQLVVEPEGGAVAPGGTVTLTCEVPAQPSPQIHWMKDGVPLPLPPSPVLILPEIGPQDQGTYSCVATHSSHGPQESRAVSISIIEPGEEGPTAGSVGGSGLGTLALALGILGGLGTAALLIGVILWQRRQRRGEERPQKTRRKRRSVQN

SEQ ID NO: 14 - protein, 702 aa, Artificial Sequence
  CEA biomarker (UniProt: P05731-1) (entry version 179)
MESPSAPPHRWCIPWQRLLLTASLLTFWNPPTTAKLTIESTPFNVAEGKEVLLLVHNLPQHLFGYSWYKGERVDGNRQIIGYVIGTQQATPGPAYSGREIIYPNASLLIQNIIQNDTGFYTLHVIKSDLVNEEATGQFRVYPELPKPSISSNNSKPVEDKDAVAFTCEPETQDATYLWWVNNQSLPVSPRLQLSNGNRTLTLFNVTRNDTASYKCETQNPVSARRSDSVILNVLYGPDAPTISPLNTSYRSGENLNLSCHAASNPPAQYSWFVNGTFQQSTQELFIPNITVNNSGSYTCQAHNSDTGLNRTTVTTITVYAEPPKPFITSNNSNPVEDEDAVALTCEPEIQNTTYLWWVNNQSLPVSPRLQLSNDNRTLTLLSVTRNDVGPYECGIQNKLSVDHSDPVILNVLYGPDDPTISPSYTYYRPGVNLSLSCHAASNPPAQYSWLIDGNIQQHTQELFISNITEKNSGLYTCQANNSASGHSRTTVKTITVSAELPKPSISSNNSKPVEDKDAVAFTCEPEAQNTTYLWWVNGQSLPVSPRLQLSNGNRTLTLFNVTRNDARAYVCGIQNSVSANRSDPVTLDVLYGPDTPIISPPDSSYLSGANLNLSCHSASNPSPQYSWRINGIPQQHTQVLFIAKITPNNNGTYACFVSNLATGRNNSIVKSITVSASGTSPGLSAGATVGIMIGVLVGVALI

SEQ ID NO: 15 - protein, 701 aa, Artificial Sequence [sequence omitted]

SEQ ID NO: 16 - protein, 129 aa, Artificial Sequence
  FSH biomarker (UniProt: P01225) (entry version 189)
MKTLQFFFLFCCWKAICCNSCELTNITIAIEKEECRFCISINTTWCAGYCYTRDLVYKDPARPKIQKTCTFKELVYETVRVPGCAHHADSLYTYPVATQCHCGKCDSDSTDCTVRGLGPSYCSFGEMKE

SEQ ID NO: 17 - protein, 476 aa, Artificial Sequence
  MMP-10 biomarker (UniProt: Q8WWA0) (entry version 185)
MMHLAFLVLLCLPVCSAYPLSGAAKEEDSNKDLAQQYLEKYYNLEKDVKQFRRKDSNLIVKKIQGMQKFLGLEVTGKLDTDTLEVMRKPRCGVPDVGHFSSFPGMPKWRKTHLTYRIVNYTPDLPRDAVDSAIEKALKVWEEVTPLTFSRLYEGEADIMISFAVKEHGDFYSFDGPGHSLAHAYPPGPGLYGDIHFDDDEKWTEDASGTNLFLVAAHELGHSLGLFHSANTEALMYPLYNSFTELAQFRLSQDDVNGIQSLYGPPPASTEEPLVPTKSVPSGSEMPAKCDPALSFDAISTLRGEYLFFKDRYFWRRSHWNPEPEFHLISAFWPSLPSYLDAAYEVNSRDTVFIFKGNEFWAIRGNEVQAGYPRGIHTLGFPPTIRKIDAAVSDKEKKKTYFFAADKYWRFDENSQSMEQGFPRLIADDFPGVEPKVDAVLQAFGFFYFFSGSSQFEFDPNARMVTHILKSNSWLHC

SEQ ID NO: 18 - protein, 313 aa, Artificial Sequence
  Omentin biomarker (UniProt: Q8WWAO) (entry version 127)
MNQLSFLLFLIATTRGWSTDEANTYFKEWTCSSSPSLPRSCKEIKDECPSAFDGLYFLRTENGVIYQTFCDMTSGGGGWTLVASVHENDMRGKCTVGDRWSSQQGSKAVYPEGDGNWANYNTFGSAEAATSDDYKNPGYYDIQAKDLGIWHVPNKSPMQHWRNSSLLRYRTDTGFLQTLGHNLFGIYQKYPVKYGEGKCWTDNGPVIPVVYDFGDAQKTASYYSPYGQREFTAGFVQFRVFNNERAANALCAGMRVTGCNTEHHCIGGGGYFPEASPQQCGDFSGFDWSGYGTHVGYSSSREITEAAVLLFYR

SEQ ID NO: 19 - protein, 866 aa, Artificial Sequence
  CA-19-9 biomarker (UniProt: Q9BXJ9-1) (entry version 160)
MPAVSLPPKENALFKRILRCYEHKQYRNGLKFCKQILSNPKFAEHGETLAMKGLTLNCLGKKEEAYELVRRGLRNDLKSHVCWHVYGLLQRSDKKYDEAIKCYRNALKWDKDNLQILRDLSLLQIQMRDLEGYRETRYQLLQLRPAQRASWIGYAIAYHLLEDYEMAAKILEEFRKTQQTSPDKVDYEYSELLLYQNQVLREAGLYREALEHLCTYEKQICDKLAVEETKGELLLQLCRLEDAADVYRGLQERNPENWAYYKGLEKALKPANMLERLKIYEEAWTKYPRGLVPRRLPLNFLSGEKFKECLDKFLRMNFSKGCPPVFNTLRSLYKDKEKVAIIEELVVGYETSLKSCRLFNPNDDGKEEPPTTLLWVQYYLAQHYDKIGQPSIALEYINTAIESTPTLIELFLVKAKIYKHAGNIKEAARWMDEAQALDTADRFINSKCAKYMLKANLIKEAEEMCSKFTREGTSAVENLNEMQCMWFQTECAQAYKAMNKFGEALKKCHEIERHFIEITDDQFDFHTYCMRKITLRSYVDLLKLEDVLRQHPFYFKAARIAIEIYLKLHDNPLTDENKEHEADTANMSDKELKKLRNKQRRAQKKAQIEEEKKNAEKEKQQRNQKKKKDDDDEEIGGPKEELIPEKLAKVETPLEEAIKFLTPLKNLVKNKIETHLFAFEIYFRKEKFLLMLQSVKRAFAIDSSHPWLHECMIRLFNTAVCESKDLSDTVRTVLKQEMNRLFGATNPKNFNETFLKRNSDSLPHRLSAAKMVYYLDPSSQKRAIELATTLDESLTNRNLQTCMEVLEALYDGSLGDCKEAAEIYRANCHKLFPYALAFMPPGYEEDMKITVNGDSSAEAEELANEI

SEQ ID NO: 20 - protein, 526 aa, Artificial Sequence
  CA-19-9 biomarker (UniProt: Q9BXJ9-2)
MPAVSLPPKENALFKRILRCYEHKQYRNGLKFCKQILSNPKFAEHGETLAMKGLTLNCLGKKEEAYELVRRGLRNDLKSHVCWHVYGLLQRSDKKYDEAIKCYRNALKWDKDNLQILRDLSLLQIQMRDLEGYRETRYQLLQLRPAQRASWIGYAIAYHLLEDYEMAAKILEEFRKTQQTSPDKVDYEYSELLLYQNQVLREAGLYREALEHLCTYEKQICDKLAVEETKGELLLQLCRLEDAADVYRGLQERNPENWAYYKGLEKALKPANMLERLKIYEEAWTKYPRGLVPRRLPLNFLSGEKFKECLDKFLRMNFSKGCPPVFNTLRSLYKDKEKVAIIEELVVGYETSLKSCRLFNPNDDGKEEPPTTLLWVQYYLAQHYDKIGQPSIALEYINTAIESTPTLIELFLVKAKIYKHAGNIKEAARWMDEAQALDTADRFINSKCAKYMLKANLIKEAEEMCSKFTREGTSAVENLNEMQCMWFQTECAQAYKAMNKFGEALKKCHEIERKSLMTSLTFIHTV

SEQ ID NO: 21 - protein, 141 aa, Artificial Sequence
  LH biomarker (UniProt: P01229) (entry version 179)
MEMLQGLLLLLLLSMGGAWASREPLRPWCHPINAILAVEKEGCPVCITVNTTICAGYCPTMMRVLQAVLPPLPQVVCTYRDVRFESIRLPGCPRGVDPVVSFPVALSCRCGPCRRSTSDCGGPKDHPLTCDHPQLSGLLFL

SEQ ID NO: 22 - protein, 406 aa, Artificial Sequence
  HP biomarker (UniProt: P00738-1) (entry version 200)
MSALGAVIALLLWGQLFAVDSGNDVTDIADDGCPKPPEIAHGYVEHSVRYQCKNYYKLRTEGDGVYTLNDKKQWINKAVGDKLPECEADDGCPKPPEIAHGYVEHSVRYQCKNYYKLRTEGDGVYTLNNEKQWINKAVGDKLPECEAVCGKPKNPANPVQRILGGHLDAKGSFPWQAKMVSHHNLTTGATLINEQWLLTTAKNLFLNHSENATAKDIAPTLTLYVGKKQLVEIEKVVLHPNYSQVDIGLIKLKQKVSVNERVMPICLPSKDYAEVGRVGYVSGWGRNANFKFTDHLKYVMLPVADQDQCIRHYEGSTVPEKKTPKSPVGVQPILNEHTFCAGMSKYQEDTCYGDAGSAFAVHDLEEDTWYATGILSFDKSCAVAEYGVYVKVTSIQDWVQKTIAEN

SEQ ID NO: 23 - protein, 347 aa, Artificial Sequence
  HP biomarker (UniProt P00738-2)
MSALGAVIALLLWGQLFAVDSGNDVTDIADDGCPKPPEIAHGYVEHSVRYQCKNYYKLRTEGDGVYTLNNEKQWINKAVGDKLPECEAVCGKPKNPANPVQRILGGHLDAKGSFPWQAKMVSHHNLTTGATLINEQWLLTTAKNLFLNHSENATAKDIAPTLTLYVGKKQLVEIEKVVLHPNYSQVDIGLIKLKQKVSVNERVMPICLPSKDYAEVGRVGYVSGWGRNANFKFTDHLKYVMLPVADQDQCIRHYEGSTVPEKKTPKSPVGVQPILNEHTFCAGMSKYQEDTCYGDAGSAFAVHDLEEDTWYATGILSFDKSCAVAEYGVYVKVTSIQDWVQKTIAEN

SEQ ID NO: 24 - protein, 128 aa, Artificial Sequence
  NAP-2 biomarker (UniProt: P02775) (entry version 191)
MSLRLDTTPSCNSARPLHALQVLLLLSLLLTALASSTKGQTKRNLAKGKEESLDSDLYAELRCMCIKTTSGIHPKNIQSLEVIGKGTHCNQVEVIATLKDGRKICLDPDAPRIKKIVQKKLAGDESAD

SEQ ID NO: 25 - protein, 428 aa, Artificial Sequence
  IgE biomarker (UniProt: P01854)(entry version 162)
ASTQSPSVFPLTRCCKNIPSNATSVTLGCLATGYFPEPVMVTWDTGSLNGTTMTLPATTLTLSGHYATISLLTVSGAWAKQMFTCRVAHTPSSTDWVDNKTFSVCSRDFTPPTVKILQSSCDGGGHFPPTIQLLCLVSGYTPGTINITWLEDGQVMDVDLSTASTTQEGELASTQSELTLSQKHWLSDRTYTCQVTYQGHTFEDSTKKCADSNPRGVSAYLSRPSPFDLFIRKSPTITCLVVDLAPSKGTVNLTWSRASGKPVNHSTRKEEKQRNGTLTVTSTLPVGTRDWIEGETYQCRVTHPHLPRALMRSTTKTSGPRAAPEVYAFATPEWPGSRDKRTLACLIQNFMPEDISVQWLHNEVQLPDARHSTTQPRKTKGSGFFVFSRLEVTRAEWEQKDEFICRAVHEAASPSQTVQRAVSVNPGK

SEQ ID NO: 26 - protein, 261 aa, Artificial Sequence
  CD40-L biomarker (UniProt: P29965)(entry version 162)
MIETYNQTSPRSAATGLPISMKIFMYLLTVFLITQMIGSALFAVYLHRRLDKIEDERNLHEDFVFMKTIQRCNTGERSLSLLNCEEIKSQFEGFVKDIMLNKEETKKENSFEMQKGDQNPQIAAHVISEASSKTTSVLQWAEKGYYTMSNNLVTLENGKQLTVKRQGLYYIYAQVTFCSNREASSQAPFIASLCLKSPGRFERILLRAANTHSSAKPCGQQSIHLGGVFELQPGASVFVNVTDPSQVSHGTGFTSFGLLKL

SEQ ID NO: 27 - protein, 760 aa, Artificial Sequence
  TFR1 biomarker (UniProt: P02786)(entry version 222)
MMDQARSAFSNLFGGEPLSYTRFSLARQVDGDNSHVEMKLAVDEEENADNNTKANVTKPKRCSGSICYGTIAVIVFFLIGFMIGYLGYCKGVEPKTECERLAGTESPVREEPGEDFPAARRLYWDDLKRKLSEKLDSTDFTGTIKLLNENSYVPREAGSQKDENLALYVENQFREFKLSKVWRDQHFVKIQVKDSAQNSVIIVDKNGRLVYLVENPGGYVAYSKAATVTGKLVHANFGTKKDFEDLYTPVNGSIVIVRAGKITFAEKVANAESLNAIGVLIYMDQTKFPIVNAELSFFGHAHLGTGDPYTPGFPSFNHTQFPPSRSSGLPNIPVQTISRAAAEKLFGNMEGDCPSDWKTDSTCRMVTSESKNVKLTVSNVLKEIKILNIFGVIKGFVEPDHYVVVGAQRDAWGPGAAKSGVGTALLLKLAQMFSDMVLKDGFQPSRSIIFASWSAGDFGSVGATEWLEGYLSSLHLKAFTYINLDKAVLGTSNFKVSASPLLYTLIEKTMQNVKHPVTGQFLYQDSNWASKVEKLTLDNAAFPFLAYSGIPAVSFCFCEDTDYPYLGTTMDTYKELIERIPELNKVARAAAEVAGQFVIKLTHDVELNLDYERYNSQLLSFVRDLNQYRADIKEMGLSLQWLYSARGDFFRATSRLTTDFGNAEKTDRFVMKKLNDRVMRVEYHFLSPYVSPKESPFRHVFWGSGSHTLPALLENLKLRKQNNGAFNETLFRNQLALATWTIQGAANALSGDVWDIDNEF

SEQ ID NO: 28 - protein, 335 aa, Artificial Sequence
  FAS biomarker-1 (UniProt: P25445-1) (entry version 227)
MLGIWTLLPLVLTSVARLSSKSVNAQVTDINSKGLELRKTVTTVETQNLEGLHHDGQFCHKPCPPGERKARDCTVNGDEPDCVPCQEGKEYTDKAHFSSKCRRCRLCDEGHGLEVEINCTRTQNTKCRCKPNFFCNSTVCEHCDPCTKCEHGIIKECTLTSNTKCKEEGSRSNLGWLCLLLLPIPLIVWVKRKEVQKTCRKHRKENQGSHESPTLNPETVAINLSDVDLSKYITTIAGVMTLSQVKGFVRKNGVNEAKIDEIKNDNVQDTAEQKVQLLRNWHQLHGKKEAYDTLIKDLKKANLCTLAEKIQTIILKDITSDSENSNFRNEIQSLV

SEQ ID NO: 29 - protein, 103 aa, Artificial Sequence
  FAS biomarker-1 (UniProt: P25445-2)
MLGIWTLLPLVLTSVARLSSKSVNAQVTDINSKGLELRKTVTTVETQNLEGLHHDGQFCHKPCPPDVNMESSRNAHSPATPSAKRKDPDLTWGGFVFFFCQFH

SEQ ID NO: 30 - protein, 86 aa, Artificial Sequence
  FAS biomarker-1 (UniProt: P25445-3)
MLGIWTLLPLVLTSVARLSSKSVNAQVTDINSKGLELRKTVTTVETQNLEGLHHDGQFCHKPCPPDVNMESSRNAHSPATPSAKRK

SEQ ID NO: 31 - protein, 149 aa, Artificial Sequence
  FAS biomarker-1 (UniProt: P25445-4)
MLGIWTLLPLVLTSVARLSSKSVNAQVTDINSKGLELRKTVTTVETQNLEGLHHDGQFCHKPCPPGERKARDCTVNGDEPDCVPCQEGKEYTDKAHFSSKCRRCRLCDEGHDVNMESSRNAHSPATPSAKRKDPDLTWGGFVFFFCQFH

SEQ ID NO: 32 - protein, 132 aa, Artificial Sequence
  FAS biomarker-1 (UniProt: P25445-5)
MLGIWTLLPLVLTSVARLSSKSVNAQVTDINSKGLELRKTVTTVETQNLEGLHHDGQFCHKPCPPGERKARDCTVNGDEPDCVPCQEGKEYTDKAHFSSKCRRCRLCDEGHDVNMESSRNAHSPATPSAKRK

SEQ ID NO: 33 - protein, 314 aa, Artificial Sequence
  FAS biomarker-1 (UniProt: P25445-6)
MLGIWTLLPLVLTSVARLSSKSVNAQVTDINSKGLELRKTVTTVETQNLEGLHHDGQFCHKPCPPGERKARDCTVNGDEPDCVPCQEGKEYTDKAHFSSKCRRCRLCDEGHGLEVEINCTRTQNTKCRCKPNFFCNSTVCEHCDPCTKCEHGIIKECTLTSNTKCKEEVKRKEVQKTCRKHRKENQGSHESPTLNPETVAINLSDVDLSKYITTIAGVMTLSQVKGFVRKNGVNEAKIDEIKNDNVQDTAEQKVQLLRNWHQLHGKKEAYDTLIKDLKKANLCTLAEKIQTIILKDITSDSENSNFRNEIQSLV

SEQ ID NO: 34 - protein, 220 aa, Artificial Sequence
  FAS biomarker-1 (UniProt: P25445-7)
MLGIWTLLPLVLTSVARLSSKSVNAQVTDINSKGLELRKTVTTVETQNLEGLHHDGQFCHKPCPPGERKARDCTVNGDEPDCVPCQEGKEYTDKAHFSSKCRRCRLCDEGHGLEVEINCTRTQNTKCRCKPNFFCNSTVCEHCDPCTKCEHGIIKECTLTSNTKCKEEGSRSNLGWLCLLLLPIPLIVWVKRKEVQKTCRKHRKENQGSHESPTLNPMLT

SEQ ID NO: 35 - protein, 99 aa, Artificial Sequence
  IL-8 biomarker (UniProt: P10145)(entry version 210)
MTSKLAVALLAAFLISAALCEGAVLPRSAKELRCQCIKTYSKPFHPKFIKELRVIESGPHCANTEIIVKLSDGRELCLDPKENWVQRVVEKFLKRAENS

SEQ ID NO: 36 - protein, 640 aa, Artificial Sequence
  THP biomarker (UniProt: P07911-1) (entry version 182)
MGQPSLTWMLMVVVASWFITTAATDTSEARWCSECHSNATCTEDEAVTTCTCQEGFTGDGLTCVDLDECAIPGAHNCSANSSCVNTPGSFSCVCPEGFRLSPGLGCTDVDECAEPGLSHCHALATCVNVVGSYLCVCPAGYRGDGWHCECSPGSCGPGLDCVPEGDALVCADPCQAHRTLDEYWRSTEYGEGYACDTDLRGWYRFVGQGGARMAETCVPVLRCNTAAPMWLNGTHPSSDEGIVSRKACAHWSGHCCLWDASVQVKACAGGYYVYNLTAPPECHLAYCTDPSSVEGTCEECSIDEDCKSNNGRWHCQCKQDFNITDISLLEHRLECGANDMKVSLGKCQLKSLGFDKVFMYLSDSRCSGFNDRDNRDWVSVVTPARDGPCGTVLTRNETHATYSNTLYLADEIIIRDLNIKINFACSYPLDMKVSLKTALQPMVSALNIRVGGTGMFTVRMALFQTPSYTQPYQGSSVTLSTEAFLYVGTMLDGGDLSRFALLMTNCYATPSSNATDPLKYFIIQDRCPHTRDSTIQVVENGESSQGRFSVQMFRFAGNYDLVYLHCEVYLCDTMNEKCKPTCSGTRFRSGSVIDQSRVLNLGPITRKGVQATVSRAFSSLGLLKVWLPLLLSATLTLTFQ

SEQ ID NO: 37 - protein, 507 aa, Artificial Sequence
  THP biomarker (UniProt: P07911-2)
MGQPSLTWMLMVVVASWFITTAATDTSEARWCSECHSNATCTEDEAVTTCTCQEGFTGDGLTCVDLRGWYRFVGQGGARMAETCVPVLRCNTAAPMWLNGTHPSSDEGIVSRKACAHWSGHCCLWDASVQVKACAGGYYVYNLTAPPECHLAYCTDPSSVEGTCEECSIDEDCKSNNGRWHCQCKQDFNITDISLLEHRLECGANDMKVSLGKCQLKSLGFDKVFMYLSDSRCSGFNDRDNRDWVSVVTPARDGPCGTVLTRNETHATYSNTLYLADEIIIRDLNIKINFACSYPLDMKVSLKTALQPMVSALNIRVGGTGMFTVRMALFQTPSYTQPYQGSSVTLSTEAFLYVGTMLDGGDLSRFALLMTNCYATPSSNATDPLKYFIIQDRCPHTRDSTIQVVENGESSQGRFSVQMFRFAGNYDLVYLHCEVYLCDTMNEKCKPTCSGTRFRSGSVIDQSRVLNLGPITRKGVQATVSRAFSSLGLLKVWLPLLLSATLTLTFQ

SEQ ID NO: 38 - protein, 611 aa, Artificial Sequence
  THP biomarker (UniProt: P07911-3)
MGQPSLTWMLMVVVASWFITTAATDTSEARWCSECHSNATCTEDEAVTTCTCQEGFTGDGLTCVDLDECAIPGAHNCSANSSCVNTPGSFSCVCPEGFRLSPGLGCTDVDECAEPGLSHCHALATCVNVVGSYLCVCPAGYRGDGWHCECSPGSCGPGLDCVPEGDALVCADPCQAHRTLDEYWRSTEYGEGYACDTDLRGWYRPHPSSDEGIVSRKACAHWSGHCCLWDASVQVKACAGGYYVYNLTAPPECHLAYCTDPSSVEGTCEECSIDEDCKSNNGRWHCQCKQDFNITDISLLEHRLECGANDMKVSLGKCQLKSLGFDKVFMYLSDSRCSGFNDRDNRDWVSVVTPARDGPCGTVLTRNETHATYSNTLYLADEIIIRDLNIKINFACSYPLDMKVSLKTALQPMVSALNIRVGGTGMFTVRMALFQTPSYTQPYQGSSVTLSTEAFLYVGTMLDGGDLSRFALLMTNCYATPSSNATDPLKYFIIQDRCPHTRDSTIQVVENGESSQGRFSVQMFRFAGNYDLVYLHCEVYLCDTMNEKCKPTCSGTRFRSGSVIDQSRVLNLGPITRKGVQATVSRAFSSLGLLKVWLPLLLSATLTLTFQ

SEQ ID NO: 39 - protein, 618 aa, Artificial Sequence
  THP biomarker (UniProt: P07911-4)
MGQPSLTWMLMVVVASWFITTAATDTSEARWCSECHSNATCTEDEAVTTCTCQEGFTGDGLTCVDLDECAIPGAHNCSANSSCVNTPGSFSCVCPEGFRLSPGLGCTDVDECAEPGLSHCHALATCVNVVGSCGPGLDCVPEGDALVCADPCQAHRTLDEYWRSTEYGEGYACDTDLRGWYRFVGQGGARMAETCVPVLRCNTAAPMWLNGTHPSSDEGIVSRKACAHWSGHCCLWDASVQVKACAGGYYVYNLTAPPECHLAYCTDPSSVEGTCEECSIDEDCKSNNGRWHCQCKQDFNITDISLLEHRLECGANDMKVSLGKCQLKSLGFDKVFMYLSDSRCSGFNDRDNRDWVSVVTPARDGPCGTVLTRNETHATYSNTLYLADEIIIRDLNIKINFACSYPLDMKVSLKTALQPMVSALNIRVGGTGMFTVRMALFQTPSYTQPYQGSSVTLSTEAFLYVGTMLDGGDLSRFALLMTNCYATPSSNATDPLKYFIIQDRCPHTRDSTIQVVENGESSQGRFSVQMFRFAGNYDLVYLHCEVYLCDTMNEKCKPTCSGTRFRSGSVIDQSRVLNLGPITRKGVQATVSRAFSSLGLLKVWLPLLLSATLTLTFQ

SEQ ID NO: 40 - protein, 673 aa, Artificial Sequence
  THP biomarker (UniProt: P07911-5)
MGQPSLTWMLMVVVASWFITTAATDTSEARTKYNCPARWSWRTPQRGGDTEQGPDEDFTSQGRWCSECHSNATCTEDEAVTTCTCQEGFTGDGLTCVDLDECAIPGAHNCSANSSCVNTPGSFSCVCPEGFRLSPGLGCTDVDECAEPGLSHCHALATCVNVVGSYLCVCPAGYRGDGWHCECSPGSCGPGLDCVPEGDALVCADPCQAHRTLDEYWRSTEYGEGYACDTDLRGWYRFVGQGGARMAETCVPVLRCNTAAPMWLNGTHPSSDEGIVSRKACAHWSGHCCLWDASVQVKACAGGYYVYNLTAPPECHLAYCTDPSSVEGTCEECSIDEDCKSNNGRWHCQCKQDFNITDISLLEHRLECGANDMKVSLGKCQLKSLGFDKVFMYLSDSRCSGFNDRDNRDWVSVVTPARDGPCGTVLTRNETHATYSNTLYLADEIIIRDLNIKINFACSYPLDMKVSLKTALQPMVSALNIRVGGTGMFTVRMALFQTPSYTQPYQGSSVTLSTEAFLYVGTMLDGGDLSRFALLMTNCYATPSSNATDPLKYFIIQDRCPHTRDSTIQVVENGESSQGRFSVQMFRFAGNYDLVYLHCEVYLCDTMNEKCKPTCSGTRFRSGSVIDQSRVLNLGPITRKGVQATVSRAFSSLGLLKVWLPLLLSATLTLTFQ

SEQ ID NO: 41 - protein, 259 aa, Artificial Sequence
  TRAIL-R3 biomarker (UniProt: O14798)(entry version 152)
MARIPKTLKFVVVIVAVLLPVLAYSATTARQEEVPQQTVAPQQQRHSFKGEECPAGSHRSEHTGACNPCTEGVDYTNASNNEPSCFPCTVCKSDQKHKSSCTMTRDTVCQCKEGTFRNENSPEMCRKCSRCPSGEVQVSNCTSWDDIQCVEEFGANATVETPAAEETMNTSPGTPAPAAEETMNTSPGTPAPAAEETMTTSPGTPAPAAEETMTTSPGTPAPAAEETMITSPGTPASSHYLSCTIVGIIVLIVLLIVFV

SEQ ID NO: 42 - protein, 93 aa, Artificial Sequence
  MDC biomarker (UniProt:O00626)(entry version 153)
MDRLQTALLVVLVLLAVALQATEAGPYGANMEDSVCCRDYVRYRLPLRVVKHFYWTSDSCPRPGVVLLTFRDKEICADPRVPWVKMILNKLSQ

SEQ ID NO: 43 - protein, 132 aa, Artificial Sequence
  ALP biomarker (UniPro: P03973)(entry version 184)
MKSSGLFPFLVLLALGTLAPWAVEGSGKSFKAGVCPPKKSAQCLRYKKPECQSDWQCPGKKRCCPDTCGIKCLDPVDTPNPTRRKPGKCPVTYGQCLMLNPPNFCEMDGQCKRDLKCCMGMCGKSCVSPVKA

SEQ ID NO: 44 - protein, 94 aa, Artificial Sequence
  TFF3 biomarker (UniProt: Q07654)(entry version 161)
MKRVLSCVPEPTVVMAARALCMLGLVLALLSSSSAEEYVGLSANQCAVPAKDRVDCGYPHVTPKECNNRGCCFDSRIPGVPWCFKPLQEAECTF

SEQ ID NO: 45 - protein, 132 aa, Artificial Sequence
  FABP biomarker (UniProt: P15090)(entry version 183)
MCDAFVGTWKLVSSENFDDYMKEVGVGFATRKVAGMAKPNMIISVNGDVITIKSESTFKNTEISFILGQEFDEVTADDRKVKSTITLDGGVLVHVQKWDGKSTTIKRKREDDKLVVECVMKGVTSTRVYERA

SEQ ID NO: 46 - protein, 2813 aa, Artificial Sequence
  vWF biomarker (UniProt: P04275-1)(entry version 233)
MIPARFAGVLLALALILPGTLCAEGTRGRSSTARCSLFGSDFVNTFDGSMYSFAGYCSYLLAGGCQKRSFSIIGDFQNGKRVSLSVYLGEFFDIHLFVNGTVTQGDQRVSMPYASKGLYLETEAGYYKLSGEAYGFVARIDGSGNFQVLLSDRYFNKTCGLCGNFNIFAEDDFMTQEGTLTSDPYDFANSWALSSGEQWCERASPPSSSCNISSGEMQKGLWEQCQLLKSTSVFARCHPLVDPEPFVALCEKTLCECAGGLECACPALLEYARTCAQEGMVLYGWTDHSACSPVCPAGMEYRQCVSPCARTCQSLHINEMCQERCVDGCSCPEGQLLDEGLCVESTECPCVHSGKRYPPGTSLSRDCNTCICRNSQWICSNEECPGECLVTGQSHFKSFDNRYFTFSGICQYLLARDCQDHSFSIVIETVQCADDRDAVCTRSVTVRLPGLHNSLVKLKHGAGVAMDGQDVQLPLLKGDLRIQHTVTASVRLSYGEDLQMDWDGRGRLLVKLSPVYAGKTCGLCGNYNGNQGDDFLTPSGLAEPRVEDFGNAWKLHGDCQDLQKQHSDPCALNPRMTRFSEEACAVLTSPTFEACHRAVSPLPYLRNCRYDVCSCSDGRECLCGALASYAAACAGRGVRVAWREPGRCELNCPKGQVYLQCGTPCNLTCRSLSYPDEECNEACLEGCFCPPGLYMDERGDCVPKAQCPCYYDGEIFQPEDIFSDHHTMCYCEDGFMHCTMSGVPGSLLPDAVLSSPLSHRSKRSLSCRPPMVKLVCPADNLRAEGLECTKTCQNYDLECMSMGCVSGCLCPPGMVRHENRCVALERCPCFHQGKEYAPGETVKIGCNTCVCQDRKWNCTDHVCDATCSTIGMAHYLTFDGLKYLFPGECQYVLVQDYCGSNPGTFRILVGNKGCSHPSVKCKKRVTILVEGGEIELFDGEVNVKRPMKDETHFEVVESGRYIILLLGKALSVVWDRHLSISVVLKQTYQEKVCGLCGNFDGIQNNDLTSSNLQVEEDPVDFGNSWKVSSQCADTRKVPLDSSPATCHNNIMKQTMVDSSCRILTSDVFQDCNKLVDPEPYLDVCIYDTCSCESIGDCACFCDTIAAYAHVCAQHGKVVTWRTATLCPQSCEERNLRENGYECEWRYNSCAPACQVTCQHPEPLACPVQCVEGCHAHCPPGKILDELLQTCVDPEDCPVCEVAGRRFASGKKVTLNPSDPEHCQICHCDVVNLTCEACQEPGGLVVPPTDAPVSPTTLYVEDISEPPLHDFYCSRLLDLVFLLDGSSRLSEAEFEVLKAFVVDMMERLRISQKWVRVAVVEYHDGSHAYIGLKDRKRPSELRRIASQVKYAGSQVASTSEVLKYTLFQIFSKIDRPEASRITLLLMASQEPQRMSRNFVRYVQGLKKKKVIVIPVGIGPHANLKQIRLIEKQAPENKAFVLSSVDELEQQRDEIVSYLCDLAPEAPPPTLPPDMAQVTVGPGLLGVSTLGPKRNSMVLDVAFVLEGSDKIGEADFNRSKEFMEEVIQRMDVGQDSIHVTVLQYSYMVTVEYPFSEAQSKGDILQRVREIRYQGGNRTNTGLALRYLSDHSFLVSQGDREQAPNLVYMVTGNPASDEIKRLPGDIQVVPIGVGPNANVQELERIGWPNAPILIQDFETLPREAPDLVLQRCCSGEGLQIPTLSPAPDCSQPLDVILLLDGSSSFPASYFDEMKSFAKAFISKANIGPRLTQVSVLQYGSITTIDVPWNVVPEKAHLLSLVDVMQREGGPSQIGDALGFAVRYLTSEMHGARPGASKAVVILVTDVSVDSVDAAADAARSNRVTVFPIGIGDRYDAAQLRILAGPAGDSNVVKLQRIEDLPTMVTLGNSFLHKLCSGFVRICMDEDGNEKRPGDVWTLPDQCHTVTCQPDGQTLLKSHRVNCDRGLRPSCPNSQSPVKVEETCGCRWTCPCVCTGSSTRHIVTFDGQNFKLTGSCSYVLFQNKEQDLEVILHNGACSPGARQGCMKSIEVKHSALSVELHSDMEVTVNGRLVSVPYVGGNMEVNVYGAIMHEVRFNHLGHIFTFTPQNNEFQLQLSPKTFASKTYGLCGICDENGANDFMLRDGTVTTDWKTLVQEWTVQRPGQTCQPILEEQCLVPDSSHCQVLLLPLFAECHKVLAPATFYAICQQDSCHQEQVCEVIASYAHLCRTNGVCVDWRTPDFCAMSCPPSLVYNHCEHGCPRHCDGNVSSCGDHPSEGCFCPPDKVMLEGSCVPEEACTQCIGEDGVQHQFLEAWVPDHQPCQICTCLSGRKVNCTTQPCPTAKAPTCGLCEVARLRQNADQCCPEYECVCDPVSCDLPPVPHCERGLQPTLTNPGECRPNFTCACRKEECKRVSPPSCPPHRLPTLRKTQCCDEYECACNCVNSTVSCPLGYLASTATNDCGCTTTTCLPDKVCVHRSTIYPVGQFWEEGCDVCTCTDMEDAVMGLRVAQCSQKPCEDSCRSGFTYVLHEGECCGRCLPSACEVVTGSPRGDSQSSWKSVGSQWASPENPCLINECVRVKEEVFIQQRNVSCPQLEVPVCPSGFQLSCKTSACCPSCRCERMEACMLNGTVIGPGKTVMIDVCTTCRCMVQVGVISGFKLECRKTTCNPCPLGYKEENNTGECCGRCLPTACTIQLRGGQIMTLKRDETLQDGCDTHFCKVNERGEYFWEKRVTGCPPFDEHKCLAEGGKIMKIPGTCCDTCEEPECNDITARLQYVKVGSCKSEVEVDIHYCQGKCASKAMYSIDINDVQDQCSCCSPTRTEPMQVALHCTNGSVVYHEVLNAMECKCSPRKCSK

SEQ ID NO: 47 - protein, 351 aa, Artificial Sequence
  vWF biomarker (UniProt: P04275-2)
MGAQDEEEGIQDLDGLLVFDKIVEVTLLNLPWYNEETEGQRGEMTAPKSPRAKIRGTLCAEGTRGRSSTARCSLFGSDFVNTFDGSMYSFAGYCSYLLAGGCQKRSFSIIGDFQNGKRVSLSVYLGEFFDIHLFVNGTVTQGDQRVSMPYASKGLYLETEAGYYKLSGEAYGFVARIDGSGNFQVLLSDRYFNKTCGLCGNFNIFAEDDFMTQEGTLTSDPYDFANSWALSSGEQWCERASPPSSSCNISSGEMQKEEPECNDITARLQYVKVGSCKSEVEVDIHYCQGKCASKAMYSIDINDVQDQCSCCSPTRTEPMQVALHCTNGSVVYHEVLNAMECKCSPRKCSKI

SEQ ID NO: 48 - protein, 474 aa, Artificial Sequence [sequence omitted]

SEQ ID NO: 49 - protein, 352 aa, Artificial Sequence
  VDBP biomarker (UniProt: P02774-2)
MAALKHQPQEFPTYVEPTNDEICEAFRKDPKEYANQFMWEYSTNYGQAPLSLLVSYTKSYLSMVGSCCTSASPTVCFLKERLQLKHLSLLTTLSNRVCSQYAAYGEKKSRLSNLIKLAQKVPTADLEDVLPLAEDITNILSKCCESASEDCMAKELPEHTVKLCDNLSTKNSKFEDCCQEKTAMDVFVCTYFMPAAQLPELPDVELPTNKDVCDPGNTKVMDKYTFELSRRTHLPEVFLSKVLEPTLKSLGECCDVEDSTTCFNAKGPLLKKELSSFIDKGQELCADYSENTFTEYKKKLAERLKAKLPDATPTELAKLVNKHSDFASNCCSINSPPLYCDSEIDAELKNIL

SEQ ID NO: 50 - protein, 493 aa, Artificial Sequence
  VDBP biomarker (UniProt: P02774-3)
MLWSWSEERGGAARLSGRKMKRVLVLLLAVAFGHALERGRDYEKNKVCKEFSHLGKEDFTSLSLVLYSRKFPSGTFEQVSQLVKEVVSLTEACCAEGADPDCYDTRTSALSAKSCESNSPFPVHPGTAECCTKEGLERKLCMAALKHQPQEFPTYVEPTNDEICEAFRKDPKEYANQFMWEYSTNYGQAPLSLLVSYTKSYLSMVGSCCTSASPTVCFLKERLQLKHLSLLTTLSNRVCSQYAAYGEKKSRLSNLIKLAQKVPTADLEDVLPLAEDITNILSKCCESASEDCMAKELPEHTVKLCDNLSTKNSKFEDCCQEKTAMDVFVCTYFMPAAQLPELPDVELPTNKDVCDPGNTKVMDKYTFELSRRTHLPEVFLSKVLEPTLKSLGECCDVEDSTTCFNAKGPLLKKELSSFIDKGQELCADYSENTFTEYKKKLAERLKAKLPDATPTELAKLVNKHSDFASNCCSINSPPLYCDSEIDAELKNIL

SEQ ID NO: 51 - protein, 98 aa, Artificial Sequence
  Cystatin-B biomarker (UniProt: P04080)
MMCGAPSATQPATAETQHIADQVRSQLEEKENKKFPVFKAVSFKSQVVAGTNYFIKVHVGDEDFVHLRVFQSLPHENKPLTLSNYQTNKAKHDELTYF

SEQ ID NO: 52 - protein, 91 aa, Artificial Sequence
  Uteroglobin biomarker (UniProt: P11684)(entry version 163)
MKLAVTLTLVTLALCCSSASAEICPSFQRVIETLLMDTPSSYEAAMELFSPDQDMREAGAQLKKLVDTLPQKPRESIIKLMEKIAQSSLCN

SEQ ID NO: 53 - protein, 866 aa, Artificial Sequence
  Fibrinogen biomarker (UniProt: P02671-1) (entry version 227)
MFSMRIVCLVLSVVGTAWTADSGEGDFLAEGGGVRGPRVVERHQSACKDSDWPFCSDEDWNYKCPSGCRMKGLIDEVNQDFTNRINKLKNSLFEYQKNNKDSHSLTTNIMEILRGDFSSANNRDNTYNRVSEDLRSRIEVLKRKVIEKVQHIQLLQKNVRAQLVDMKRLEVDIDIKIRSCRGSCSRALAREVDLKDYEDQQKQLEQVIAKDLLPSRDRQHLPLIKMKPVPDLVPGNFKSQLQKVPPEWKALTDMPQMRMELERPGGNEITRGGSTSYGTGSETESPRNPSSAGSWNSGSSGPGSTGNRNPGSSGTGGTATWKPGSSGPGSTGSWNSGSSGTGSTGNQNPGSPRPGSTGTWNPGSSERGSAGHWTSESSVSGSTGQWHSESGSFRPDSPGSGNARPNNPDWGTFEEVSGNVSPGTRREYHTEKLVTSKGDKELRTGKEKVTSGSTTTTRRSCSKTVTKTVIGPDGHKEVTKEVVTSEDGSDCPEAMDLGTLSGIGTLDGFRHRHPDEAAFFDTASTGKTFPGFFSPMLGEFVSETESRGSESGIFTNTKESSSHHPGIAEFPSRGKSSSYSKQFTSSTSYNRGDSTFESKSYKMADEAGSEADHEGTHSTKRGHAKSRPVRDCDDVLQTHPSGTQSGIFNIKLPGSSKIFSVYCDQETSLGGWLLIQQRMDGSLNFNRTWQDYKRGFGSLNDEGEGEFWLGNDYLHLLTQRGSVLRVELEDWAGNEAYAEYHFRVGSEAEGYALQVSSYEGTAGDALIEGSVEEGAEYTSHNNMQFSTFDRDADQWEENCAEVYGGGWWYNNCQAANLNGIYYPGGSYDPRNNSPYEIENGVVWVSFRGADYSLRAVRMKIRPLVTQ

SEQ ID NO: 54 - protein, 644 aa, Artificial Sequence
  Fibrinogen biomarker (UniProt: P02671-2)
MFSMRIVCLVLSVVGTAWTADSGEGDFLAEGGGVRGPRVVERHQSACKDSDWPFCSDEDWNYKCPSGCRMKGLIDEVNQDFTNRINKLKNSLFEYQKNNKDSHSLTTNIMEILRGDFSSANNRDNTYNRVSEDLRSRIEVLKRKVIEKVQHIQLLQKNVRAQLVDMKRLEVDIDIKIRSCRGSCSRALAREVDLKDYEDQQKQLEQVIAKDLLPSRDRQHLPLIKMKPVPDLVPGNFKSQLQKVPPEWKALTDMPQMRMELERPGGNEITRGGSTSYGTGSETESPRNPSSAGSWNSGSSGPGSTGNRNPGSSGTGGTATWKPGSSGPGSTGSWNSGSSGTGSTGNQNPGSPRPGSTGTWNPGSSERGSAGHWTSESSVSGSTGQWHSESGSFRPDSPGSGNARPNNPDWGTFEEVSGNVSPGTRREYHTEKLVTSKGDKELRTGKEKVTSGSTTTTRRSCSKTVTKTVIGPDGHKEVTKEVVTSEDGSDCPEAMDLGTLSGIGTLDGFRHRHPDEAAFFDTASTGKTFPGFFSPMLGEFVSETESRGSESGIFTNTKESSSHHPGIAEFPSRGKSSSYSKQFTSSTSYNRGDSTFESKSYKMADEAGSEADHEGTHSTKRGHAKSRPVRGIHTSPLGKPSLSP

SEQ ID NO: 55 - protein, 1091 aa, Artificial Sequence
  EGFR biomarker (UniProt: Q504U8) (entry version 138)
MRPSGTAGAALLALLAALCPASRALEEKKVCQGTSNKLTQLGTFEDHFLSLQRMFNNCEVVLGNLEITYVQRNYDLSFLKTIQEVAGYVLIALNTVERIPLENLQIIRGNMYYENSYALAVLSNYDANKTGLKELPMRNLQGQKCDPSCPNGSCWGAGEENCQKLTKIICAQQCSGRCRGKSPSDCCHNQCAAGCTGPRESDCLVCRKFRDEATCKDTCPPLMLYNPTTYQMDVNPEGKYSFGATCVKKCPRNYVVTDHGSCVRACGADSYEMEEDGVRKCKKCEGPCRKVCNGIGIGEFKDSLSINATNIKHFKNCTSISGDLHILPVAFRGDSFTHTPPLDPQELDILKTVKEITGFLLIQAWPENRTDLHAFENLEIIRGRTKQHGQFSLAVVSLNITSLGLRSLKEISDGDVIISGNKNLCYANTINWKKLFGTSGQKTKIISNRGENSCKATGQVCHALCSPEGCWGPEPRDCVSCRNVSRGRECVDKCNLLEGEPREFVENSECIQCHPECLPQAMNITCTGRGPDNCIQCAHYIDGPHCVKTCPAGVMGENNTLVWKYADAGHVCHLCHPNCTYGCTGPGLEGCPTNGPKIPSIATGMVGALLLLLVVALGIGLFMRRRHIVRKRTLRRLLQERELVEPLTPSGEAPNQALLRILKETEFKKIKVLGSGAFGTVYKGLWIPEGEKVKIPVAIKELREATSPKANKEILDEAYVMASVDNPHVCRLLGICLTSTVQLITQLMPFGCLLDYVREHKDNIGSQYLLNWCVQIAKGMNYLEDRRLVHRDLAARNVLVKTPQHVKITDFGLAKLLGAEEKEYHAEGGKVPIKWMALESILHRIYTHQSDVWSYGVTVWELMTFGSKPYDGIPASEISSILEKGERLPQPPICTIDVYMIMVKCWMIDADSRPKFRELIIEFSKMARDPQRYLVIQGDERMHLPSPTDSNFYRALMDEEDMDDVVDADEYLIPQQGFFSSPSTSRTPLLSSLSATSNNSTVACIDRNGLQSCPIKEDSFLQRYSSDPTGALTEDSIDDTFLPVPGEWLVWKQSCSSTSSTHSAAASLQCPSQVLPPASPEGETVADLQTQ

SEQ ID NO: 56 - protein, 167 aa, Artificial Sequence
  Leptin biomarker (P41159) (entry version 176)
MHWGTLCGFLWLWPYLFYVQAVPIQKVQDDTKTLIKTIVTRINDISHTQSVSSKQKVTGLDFIPGLHPILTLSKMDQTLAVYQQILTSMPSRNVIQISNDLENLRDLLHVLAFSKSCHLPWASGLETLDSLGGVLEASGYSTEVVALSRLQGSLQDMLWQLDLSPGC

SEQ ID NO: 57 - protein, 462 aa, Artificial Sequence
  Hemopexin biomarker (UniProt: P02790) (entry version 179)
MARVLGAPVALGLWSLCWSLAIATPLPPTSAHGNVAEGETKPDPDVTERCSDGWSFDATTLDDNGTMLFFKGEFVWKSHKWDRELISERWKNFPSPVDAAFRQGHNSVFLIKGDKVWVYPPEKKEKGYPKLLQDEFPGIPSPLDAAVECHRGECQAEGVLFFQGDREWFWDLATGTMKERSWPAVGNCSSALRWLGRYYCFQGNQFLRFDPVRGEVPPRYPRDVRDYFMPCPGRGHGHRNGTGHGNSTHHGPEYMRCSPHLVLSALTSDNHGATYAFSGTHYWRLDTSRDGWHSWPIAHQWPQGPSAVDAAFSWEEKLYLVQGTQVYVFLTKGGYTLVSGYPKRLEKEVGTPHGIILDSVDAAFICPGSSRLHIMAGRRLWWLDLKSGAQATWTELPWPHEKVDGALCMEKSLGPNSCSANGPGLYLIHGPNLYCYSDVEKLNAAKALPQPQNVTSLLGCTH

SEQ ID NO: 58-59 - skipped (2 entries)

SEQ ID NO: 60 - protein, 453 aa, Artificial Sequence
  IgM biomarker (UniProt: P01871-1) (entry version 180)
GSASAPTLFPLVSCENSPSDTSSVAVGCLAQDFLPDSITFSWKYKNNSDISSTRGFPSVLRGGKYAATSQVLLPSKDVMQGTDEHVVCKVQHPNGNKEKNVPLPVIAELPPKVSVFVPPRDGFFGNPRKSKLICQATGFSPRQIQVSWLREGKQVGSGVTTDQVQAEAKESGPTTYKVTSTLTIKESDWLGQSMFTCRVDHRGLTFQQNASSMCVPDQDTAIRVFAIPPSFASIFLTKSTKLTCLVTDLTTYDSVTISWTRQNGEAVKTHTNISESHPNATFSAVGEASICEDDWNSGERFTCTVTHTDLPSPLKQTISRPKGVALHRPDVYLLPPAREQLNLRESATITCLVTGFSPADVFVQWMQRGQPLSPEKYVTSAPMPEPQAPGRYFAHSILTVSEEEWNTGETYTCVVAHEALPNRVTERTVDKSTGKPTLYNVSLVMSDTAGTCY

SEQ ID NO: 61 - protein, 474 aa, Artificial Sequence
  IgM biomarker (UniProt: P01871-2)
GSASAPTLFPLVSCENSPSDTSSVAVGCLAQDFLPDSITFSWKYKNNSDISSTRGFPSVLRGGKYAATSQVLLPSKDVMQGTDEHVVCKVQHPNGNKEKNVPLPVIAELPPKVSVFVPPRDGFFGNPRKSKLICQATGFSPRQIQVSWLREGKQVGSGVTTDQVQAEAKESGPTTYKVTSTLTIKESDWLGQSMFTCRVDHRGLTFQQNASSMCVPDQDTAIRVFAIPPSFASIFLTKSTKLTCLVTDLTTYDSVTISWTRQNGEAVKTHTNISESHPNATFSAVGEASICEDDWNSGERFTCTVTHTDLPSPLKQTISRPKGVALHRPDVYLLPPAREQLNLRESATITCLVTGFSPADVFVQWMQRGQPLSPEKYVTSAPMPEPQAPGRYFAHSILTVSEEEWNTGETYTCVVAHEALPNRVTERTVDKSTEGEVSADEEGFENLWATASTFIVLFLLSLFYSTTVTLFKVK

SEQ ID NO: 62 - protein, 468 aa, Artificial Sequence
  IL-6r biomarker (UniProt: P08887-1) (entry version 210)
MLAVGCALLAALLAAPGAALAPRRCPAQEVARGVLTSLPGDSVTLTCPGVEPEDNATVHWVLRKPAAGSHPSRWAGMGRRLLLRSVQLHDSGNYSCYRAGRPAGTVHLLVDVPPEEPQLSCFRKSPLSNVVCEWGPRSTPSLTTKAVLLVRKFQNSPAEDFQEPCQYSQESQKFSCQLAVPEGDSSFYIVSMCVASSVGSKFSKTQTFQGCGILQPDPPANITVTAVARNPRWLSVTWQDPHSWNSSFYRLRFELRYRAERSKTFTTWMVKDLQHHCVIHDAWSGLRHVVQLRAQEEFGQGEWSEWSPEAMGTPWTESRSPPAENEVSTPMQALTTNKDDDNILFRDSANATSLPVQDSSSVPLPTFLVAGGSLAFGTLLCIAIVLRFKKTWKLRALKEGKTSMHPPYSLGQLVPERPRPTPVLVPLISPPVSPSSLGSDNTSSHNRPDARDPRSPYDISNTDYFFPR

SEQ ID NO: 63 - protein, 365 aa, Artificial Sequence [sequence omitted]

SEQ ID NO: 64 - protein, 120 aa, Artificial Sequence
  HCC-4  biomarker (UniProt: O15467) (entry version 146)
MKVSEAALSLLVLILIITSASRSQPKVPEWVNTPSTCCLKYYEKVLPRRLVVGYRKALNCHLPAIIFVTKRNREVCTNPNDDWVQEYIKDPNLPLLPTRNLSTVKIITAKNGQPQLLNSQ

SEQ ID NO: 65 - protein, 207 aa, Artificial Sequence
  TIMP-1 biomarker (UniProt: P01033) (entry version 202)
MAPFEPLASGILLLLWLIAPSRACTCVPPHPQTAFCNSDLVIRAKFVGTPEVNQTTLYQRYEIKMTKMYKGFQALGDAADIRFVYTPAMESVCGYFHRSHNRSEEFLIAGKLQDGLLHITTCSFVAPWNSLSLAQRRGFTKTYTVGCEECTVFPCLSIPCKLQSGTHCLWTDQLLQGSEKGFQSRHLACLPREPGLCTWQSLRSQIA

SEQ ID NO: 66 - protein, 208 aa, Artificial Sequence
  HB-EGF biomarker (UniProt: Q99075) (entry version 171)
MKLLPSVVLKLFLAAVLSALVTGESLERLRRGLAAGTSNPDPPTVSTDQLLPLGGGRDRKVRDLQEADLDLLRVTLSSKPQALATPNKEEHGKRKKKGKGLGKKRDPCLRKYKDFCIHGECKYVKELRAPSCICHPGYHGERCHGLSLPVENRLYTYDHTTILAVVAVVLSSVCLLVIVGLLMFRYHRRGGYDVENEEKVKLGMTNSH

SEQ ID NO: 67 - protein, 390 aa, Artificial Sequence
  LAP TGF-b1 biomarker (UniProt: P01137) (entry version 235)
MPPSGLRLLLLLLPLLWLLVLTPGRPAAGLSTCKTIDMELVKRKRIEAIRGQILSKLRLASPPSQGEVPPGPLPEAVLALYNSTRDRVAGESAEPEPEPEADYYAKEVTRVLMVETHNEIYDKFKQSTHSIYMFFNTSELREAVPEPVLLSRAELRLLRLKLKVEQHVELYQKYSNNSWRYLSNRLLAPSDSPEWLSFDVTGVVRQWLSRGGEIEGFRLSAHCSCDSRDNTLQVDINGFTTGRRGDLATIHGMNRPFLLLMATPLERAQHLQSSRHRRALDTNYCFSSTEKNCCVRQLYIDFRKDLGWKWIHEPKGYHANFCLGPCPYIWSLDTQYSKVLALYNQHNPGASAAPCCVPQALEPLPIVYYVGRKPKVEQLSNMIVRSCKCS

SEQ ID NO: 68 - protein, 1207 aa, Artificial Sequence
  EGF biomarker (UniProt: P01133-1) (entry version 204)
MLLTLIILLPVVSKFSFVSLSAPQHWSCPEGTLAGNGNSTCVGPAPFLIFSHGNSIFRIDTEGTNYEQLVVDAGVSVIMDFHYNEKRIYWVDLERQLLQRVFLNGSRQERVCNIEKNVSGMAINWINEEVIWSNQQEGIITVTDMKGNNSHILLSALKYPANVAVDPVERFIFWSSEVAGSLYRADLDGVGVKALLETSEKITAVSLDVLDKRLFWIQYNREGSNSLICSCDYDGGSVHISKHPTQHNLFAMSLFGDRIFYSTWKMKTIWIANKHTGKDMVRINLHSSFVPLGELKVVHPLAQPKAEDDTWEPEQKLCKLRKGNCSSTVCGQDLQSHLCMCAEGYALSRDRKYCEDVNECAFWNHGCTLGCKNTPGSYYCTCPVGFVLLPDGKRCHQLVSCPRNVSECSHDCVLTSEGPLCFCPEGSVLERDGKTCSGCSSPDNGGCSQLCVPLSPVSWECDCFPGYDLQLDEKSCAASGPQPFLLFANSQDIRHMHFDGTDYGTLLSQQMGMVYALDHDPVENKIYFAHTALKWIERANMDGSQRERLIEEGVDVPEGLAVDWIGRRFYWTDRGKSLIGRSDLNGKRSKIITKENISQPRGIAVHPMAKRLFWTDTGINPRIESSSLQGLGRLVIASSDLIWPSGITIDFLTDKLYWCDAKQSVIEMANLDGSKRRRLTQNDVGHPFAVAVFEDYVWFSDWAMPSVMRVNKRTGKDRVRLQGSMLKPSSLVVVHPLAKPGADPCLYQNGGCEHICKKRLGTAWCSCREGFMKASDGKTCLALDGHQLLAGGEVDLKNQVTPLDILSKTRVSEDNITESQHMLVAEIMVSDQDDCAPVGCSMYARCISEGEDATCQCLKGFAGDGKLCSDIDECEMGVPVCPPASSKCINTEGGYVCRCSEGYQGDGIHCLDIDECQLGEHSCGENASCTNTEGGYTCMCAGRLSEPGLICPDSTPPPHLREDDHHYSVRNSDSECPLSHDGYCLHDGVCMYIEALDKYACNCVVGYIGERCQYRDLKWWELRHAGHGQQQKVIVVAVCVVVLVMLLLLSLWGAHYYRTQKLLSKNPKNPYEESSRDVRSRRPADTEDGMSSCPQPWFVVIKEHQDLKNGGQPVAGEDGQAADGSMQPTSWRQEPQLCGMGTEQGCWIPVSSDKGSCPQVMERSFHMPSYGTQTLEGGVEKPHSLLSANPLWQQRALDPPHQMELTQ

SEQ ID NO: 69 - protein, 1165 aa, Artificial Sequence
  EGF biomarker (UniProt: P01133-2)
MLLTLIILLPVVSKFSFVSLSAPQHWSCPEGTLAGNGNSTCVGPAPFLIFSHGNSIFRIDTEGTNYEQLVVDAGVSVIMDFHYNEKRIYWVDLERQLLQRVFLNGSRQERVCNIEKNVSGMAINWINEEVIWSNQQEGIITVTDMKGNNSHILLSALKYPANVAVDPVERFIFWSSEVAGSLYRADLDGVGVKALLETSEKITAVSLDVLDKRLFWIQYNREGSNSLICSCDYDGGSVHISKHPTQHNLFAMSLFGDRIFYSTWKMKTIWIANKHTGKDMVRINLHSSFVPLGELKVVHPLAQPKAEDDTWEPDVNECAFWNHGCTLGCKNTPGSYYCTCPVGFVLLPDGKRCHQLVSCPRNVSECSHDCVLTSEGPLCFCPEGSVLERDGKTCSGCSSPDNGGCSQLCVPLSPVSWECDCFPGYDLQLDEKSCAASGPQPFLLFANSQDIRHMHFDGTDYGTLLSQQMGMVYALDHDPVENKIYFAHTALKWIERANMDGSQRERLIEEGVDVPEGLAVDWIGRRFYWTDRGKSLIGRSDLNGKRSKIITKENISQPRGIAVHPMAKRLFWTDTGINPRIESSSLQGLGRLVIASSDLIWPSGITIDFLTDKLYWCDAKQSVIEMANLDGSKRRRLTQNDVGHPFAVAVFEDYVWFSDWAMPSVMRVNKRTGKDRVRLQGSMLKPSSLVVVHPLAKPGADPCLYQNGGCEHICKKRLGTAWCSCREGFMKASDGKTCLALDGHQLLAGGEVDLKNQVTPLDILSKTRVSEDNITESQHMLVAEIMVSDQDDCAPVGCSMYARCISEGEDATCQCLKGFAGDGKLCSDIDECEMGVPVCPPASSKCINTEGGYVCRCSEGYQGDGIHCLDIDECQLGEHSCGENASCTNTEGGYTCMCAGRLSEPGLICPDSTPPPHLREDDHHYSVRNSDSECPLSHDGYCLHDGVCMYIEALDKYACNCVVGYIGERCQYRDLKWWELRHAGHGQQQKVIVVAVCVVVLVMLLLLSLWGAHYYRTQKLLSKNPKNPYEESSRDVRSRRPADTEDGMSSCPQPWFVVIKEHQDLKNGGQPVAGEDGQAADGSMQPTSWRQEPQLCGMGTEQGCWIPVSSDKGSCPQVMERSFHMPSYGTQTLEGGVEKPHSLLSANPLWQQRALDPPHQMELTQ

SEQ ID NO: 70 - protein, 1166 aa, Artificial Sequence
  EGF biomarker (UniProt: P01133-3)
MLLTLIILLPVVSKFSFVSLSAPQHWSCPEGTLAGNGNSTCVGPAPFLIFSHGNSIFRIDTEGTNYEQLVVDAGVSVIMDFHYNEKRIYWVDLERQLLQRVFLNGSRQERVCNIEKNVSGMAINWINEEVIWSNQQEGIITVTDMKGNNSHILLSALKYPANVAVDPVERFIFWSSEVAGSLYRADLDGVGVKALLETSEKITAVSLDVLDKRLFWIQYNREGSNSLICSCDYDGGSVHISKHPTQHNLFAMSLFGDRIFYSTWKMKTIWIANKHTGKDMVRINLHSSFVPLGELKVVHPLAQPKAEDDTWEPEQKLCKLRKGNCSSTVCGQDLQSHLCMCAEGYALSRDRKYCEDVNECAFWNHGCTLGCKNTPGSYYCTCPVGFVLLPDGKRCHQLVSCPRNVSECSHDCVLTSEGPLCFCPEGSVLERDGKTCSGCSSPDNGGCSQLCVPLSPVSWECDCFPGYDLQLDEKSCAASGPQPFLLFANSQDIRHMHFDGTDYGTLLSQQMGMVYALDHDPVENKIYFAHTALKWIERANMDGSQRERLIEEGVDVPEGLAVDWIGRRFYWTDRGKSLIGRSDLNGKRSKIITKENISQPRGIAVHPMAKRLFWTDTGINPRIESSSLQGLGRLVIASSDLIWPSGITIDFLTDKLYWCDAKQSVIEMANLDGSKRRRLTQNDVGHPFAVAVFEDYVWFSDWAMPSVMRVNKRTGKDRVRLQGSMLKPSSLVVVHPLAKPGADPCLYQNGGCEHICKKRLGTAWCSCREGFMKASDGKTCLALDGHQLLAGGEVDLKNQVTPLDILSKTRVSEDNITESQHMLVAEIMVSDQDDCAPVGCSMYARCISEGEDATCQCLKGFAGDGKLCSDIDECEMGVPVCPPASSKCINTEGGYVCRCSEGYQGDGIHCLDSTPPPHLREDDHHYSVRNSDSECPLSHDGYCLHDGVCMYIEALDKYACNCVVGYIGERCQYRDLKWWELRHAGHGQQQKVIVVAVCVVVLVMLLLLSLWGAHYYRTQKLLSKNPKNPYEESSRDVRSRRPADTEDGMSSCPQPWFVVIKEHQDLKNGGQPVAGEDGQAADGSMQPTSWRQEPQLCGMGTEQGCWIPVSSDKGSCPQVMERSFHMPSYGTQTLEGGVEKPHSLLSANPLWQQRALDPPHQMELTQ

SEQ ID NO: 71 - protein, 241 aa, Artificial Sequence
  PDGF-BB biomarker (UniProt: P01127-1) (entry version 217)
MNRCWALFLSLCCYLRLVSAEGDPIPEELYEMLSDHSIRSFDDLQRLLHGDPGEEDGAELDLNMTRSHSGGELESLARGRRSLGSLTIAEPAMIAECKTRTEVFEISRRLIDRTNANFLVWPPCVEVQRCSGCCNNRNVQCRPTQVQLRPVQVRKIEIVRKKPIFKKATVTLEDHLACKCETVAAARPVTRSPGGSQEQRAKTPQTRVTIRTVRVRRPPKGKHRKFKHTHDKTALKETLGA

SEQ ID NO: 72 - protein, 226 aa, Artificial Sequence
  PDGF-BB biomarker (UniProt: P01127-2)
MFIMGLGDPIPEELYEMLSDHSIRSFDDLQRLLHGDPGEEDGAELDLNMTRSHSGGELESLARGRRSLGSLTIAEPAMIAECKTRTEVFEISRRLIDRTNANFLVWPPCVEVQRCSGCCNNRNVQCRPTQVQLRPVQVRKIEIVRKKPIFKKATVTLEDHLACKCETVAAARPVTRSPGGSQEQRAKTPQTRVTIRTVRVRRPPKGKHRKFKHTHDKTALKETLGA

SEQ ID NO: 73 - protein, 401 aa, Artificial Sequence
  OPG biomarker (UniProt: O00300) (entry version 155)
MNNLLCCALVFLDISIKWTTQETFPPKYLHYDEETSHQLLCDKCPPGTYLKQHCTAKWKTVCAPCPDHYYTDSWHTSDECLYCSPVCKELQYVKQECNRTHNRVCECKEGRYLEIEFCLKHRSCPPGFGVVQAGTPERNTVCKRCPDGFFSNETSSKAPCRKHTNCSVFGLLLTQKGNATHDNICSGNSESTQKCGIDVTLCEEAFFRFAVPTKFTPNWLSVLVDNLPGTKVNAESVERIKRQHSSQEQTFQLLKLWKHQNKDQDIVKKIIQDIDLCENSVQRHIGHANLTFEQLRSLMESLPGKKVGAEDIEKTIKACKPSDQILKLLSLWRIKNGDQDTLKGLMHALKHSKTYHFPKTVTQSLKKTIRFLHSFTMYKLYQKLFLEMIGNQVQSVKISCL

SEQ ID NO: 74 - protein, 556 aa, Artificial Sequence
  ST2 biomarker (UniProt: Q01638-1) (entry version 179)
MGFWILAILTILMYSTAAKFSKQSWGLENEALIVRCPRQGKPSYTVDWYYSQTNKSIPTQERNRVFASGQLLKFLPAAVADSGIYTCIVRSPTFNRTGYANVTIYKKQSDCNVPDYLMYSTVSGSEKNSKIYCPTIDLYNWTAPLEWFKNCQALQGSRYRAHKSFLVIDNVMTEDAGDYTCKFIHNENGANYSVTATRSFTVKDEQGFSLFPVIGAPAQNEIKEVEIGKNANLTCSACFGKGTQFLAAVLWQLNGTKITDFGEPRIQQEEGQNQSFSNGLACLDMVLRIADVKEEDLLLQYDCLALNLHGLRRHTVRLSRKNPIDHHSIYCIIAVCSVFLMLINVLVIILKMFWIEATLLWRDIAKPYKTRNDGKLYDAYVVYPRNYKSSTDGASRVEHFVHQILPDVLENKCGYTLCIYGRDMLPGEDVVTAVETNIRKSRRHIFILTPQITHNKEFAYEQEVALHCALIQNDAKVILIEMEALSELDMLQAEALQDSLQHLMKVQGTIKWREDHIANKRSLNSKFWKHVRYQMPVPSKIPRKASSLTPLAAQKQ

SEQ ID NO: 75 - protein, 328 aa, Artificial Sequence
  ST2 biomarker (UniProt: Q01638-2)
MGFWILAILTILMYSTAAKFSKQSWGLENEALIVRCPRQGKPSYTVDWYYSQTNKSIPTQERNRVFASGQLLKFLPAAVADSGIYTCIVRSPTFNRTGYANVTIYKKQSDCNVPDYLMYSTVSGSEKNSKIYCPTIDLYNWTAPLEWFKNCQALQGSRYRAHKSFLVIDNVMTEDAGDYTCKFIHNENGANYSVTATRSFTVKDEQGFSLFPVIGAPAQNEIKEVEIGKNANLTCSACFGKGTQFLAAVLWQLNGTKITDFGEPRIQQEEGQNQSFSNGLACLDMVLRIADVKEEDLLLQYDCLALNLHGLRRHTVRLSRKNPSKECF

SEQ ID NO: 76 - protein, 259 aa, Artificial Sequence
  ST2 biomarker (UniProt: Q01638-3)
MGFWILAILTILMYSTAAKFSKQSWGLENEALIVRCPRQGKPSYTVDWYYSQTNKSIPTQERNRVFASGQLLKFLPAAVADSGIYTCIVRSPTFNRTGYANVTIYKKQSDCNVPDYLMYSTVSGSEKNSKIYCPTIDLYNWTAPLEWFKNCQALQGSRYRAHKSFLVIDNVMTEDAGDYTCKFIHNENGANYSVTATRSFTVKVWCQSFCKLKKSLIFSNTHWIQSLMRGFVMVYYGVHKCCRVVFNLCLQYFQHHQWP

SEQ ID NO: 77 - protein, 211 aa, Artificial Sequence
  ST2 biomarker (UniProt: Q01638-4)
MYSTVSGSEKNSKIYCPTIDLYNWTAPLEWFKNCQALQGSRYRAHKSFLVIDNVMTEDAGDYTCKFIHNENGANYSVTATRSFTVKDEQGFSLFPVIGAPAQNEIKEVEIGKNANLTCSACFGKGTQFLAAVLWQLNGTKITDFGEPRIQQEEGQNQSFSNGLACLDMVLRIADVKEEDLLLQYDCLALNLHGLRRHTVRLSRKNPSKECF

SEQ ID NO: 78 - protein, 347 aa, Artificial Sequence
  TNF RI biomarker (UniProt: P19438-1) (entry version 225)
MGQVEISSCTVDRDTVCGCRKNQYRHYWSENLFQCFNCSLCLNGTVHLSCQEKQNTVCTCHAGFFLRENECVSCSNCKKSLECTKLCLPQIENVKGTEDSGTTVLLPLVIFFGLCLLSLLFIGLMYRYQRWKSKLYSIVCGKSTPEKEGELEGTTTKPLAPNPSFSPTPGFTPTLGFSPVPSSTFTSSSTYTPGDCPNFAAPRREVAPPYQGADPILATALASDPIPNPLQKWEDSAHKPQSLDTDDPATLYAVVENVPPLRWKEFVRRLGLSDHEIDRLELQNGRCLREAQYSMLATWRRRTPRREATLELLGRVLRDMDLLGCLEDIEEALCGPAALPPAPSLLR

SEQ ID NO: 79 - protein, 228 aa, Artificial Sequence
  TNF RI biomarker (UniProt: P19438-2)
MGLSTVPDLLLPLVLLELLVGIYPSGVIGLVPHLGDREKRDSVCPQGKYIHPQNNSICCTKCHKGTYLYNDCPGPGQDTDCRECESGSFTASENHLRHCLSCSKCRKEMGQVEISSCTVDRDTVCGCRKNQYRHYWSENLFQCFNCSLCLNGTVHLSCQEKQNTVCTCHAGFFLRENECVSCSKHHSAVAPGHFLWSLPFIPPLHWFNVSLPTVEVQALLHCLWEIDT

SEQ ID NO: 80 - protein, 223 aa, Artificial Sequence
  TNF RI biomarker (UniProt: P19438-3)
MYRYQRWKSKLYSIVCGKSTPEKEGELEGTTTKPLAPNPSFSPTPGFTPTLGFSPVPSSTFTSSSTYTPGDCPNFAAPRREVAPPYQGADPILATALASDPIPNPLQKWEDSAHKPQSLDTDDPATLYAVVENVPPLRWKEFVRRLGLSDHEIDRLELQNGRCLREAQYSMLATWRRRTPRREATLELLGRVLRDMDLLGCLEDIEEALCGPAALPPAPSLLR

SEQ ID NO: 81 - protein, 228 aa, Artificial Sequence; identical to SEQ ID NO: 79
  TNF RI biomarker (UniProt: P19438-4)

SEQ ID NO: 82 - protein, 218 aa, Artificial Sequence
  TNF RI biomarker (UniProt: P19438-5)
MGLSTVPDLLLPLVLLELLVGIYPSGVIGLVPHLGDREKRDSVCPQGKYIHPQNNSICCTKCHKGTYLYNDCPGPGQDTDCRECESGSFTASENHLRHCLSCSKCRKEMGQVEISSCTVDRDTVCGCRKNQYRHYWSENLFQCFNCSLCLNGTVHLSCQEKQNTVCTCHAGFFLRENECVSCSKVLLCRPGWNAVARSRLTATSASQIQAILLLQPPK

SEQ ID NO: 83 - protein, 232 aa, Artificial Sequence
  VEGF biomarker (UniProt: P15692-1) (entry version 230)
MNFLLSWVHWSLALLLYLHHAKWSQAAPMAEGGGQNHHEVVKFMDVYQRSYCHPIETLVDIFQEYPDEIEYIFKPSCVPLMRCGGCCNDEGLECVPTEESNITMQIMRIKPHQGQHIGEMSFLQHNKCECRPKKDRARQEKKSVRGKGKGQKRKRKKSRYKSWSVYVGARCCLMPWSLPGPHPCGPCSERRKHLFVQDPQTCKCSCKNTDSRCKARQLELNERTCRCDKPRR

SEQ ID NO: 84 - protein, 215 aa, Artificial Sequence
  VEGF biomarker (UniProt: P15692-2)
MNFLLSWVHWSLALLLYLHHAKWSQAAPMAEGGGQNHHEVVKFMDVYQRSYCHPIETLVDIFQEYPDEIEYIFKPSCVPLMRCGGCCNDEGLECVPTEESNITMQIMRIKPHQGQHIGEMSFLQHNKCECRPKKDRARQEKKSVRGKGKGQKRKRKKSRYKSWSVPCGPCSERRKHLFVQDPQTCKCSCKNTDSRCKARQLELNERTCRCDKPRR

SEQ ID NO: 85 - protein, 209 aa, Artificial Sequence
  VEGF biomarker (UniProt: P15692-3)
MNFLLSWVHWSLALLLYLHHAKWSQAAPMAEGGGQNHHEVVKFMDVYQRSYCHPIETLVDIFQEYPDEIEYIFKPSCVPLMRCGGCCNDEGLECVPTEESNITMQIMRIKPHQGQHIGEMSFLQHNKCECRPKKDRARQEKKSVRGKGKGQKRKRKKSRPCGPCSERRKHLFVQDPQTCKCSCKNTDSRCKARQLELNERTCRCDKPRR

SEQ ID NO: 86 - protein, 191 aa, Artificial Sequence
  VEGF biomarker (UniProt: P15692-4)
MNFLLSWVHWSLALLLYLHHAKWSQAAPMAEGGGQNHHEVVKFMDVYQRSYCHPIETLVDIFQEYPDEIEYIFKPSCVPLMRCGGCCNDEGLECVPTEESNITMQIMRIKPHQGQHIGEMSFLQHNKCECRPKKDRARQENPCGPCSERRKHLFVQDPQTCKCSCKNTDSRCKARQLELNERTCRCDKPRR

SEQ ID NO: 87 - protein, 174 aa, Artificial Sequence
  VEGF biomarker (UniProt: P15692-5)
MNFLLSWVHWSLALLLYLHHAKWSQAAPMAEGGGQNHHEVVKFMDVYQRSYCHPIETLVDIFQEYPDEIEYIFKPSCVPLMRCGGCCNDEGLECVPTEESNITMQIMRIKPHQGQHIGEMSFLQHNKCECRPKKDRARQENPCGPCSERRKHLFVQDPQTCKCSCKNTDSRCKM

SEQ ID NO: 88 - protein, 171 aa, Artificial Sequence
  VEGF biomarker (UniProt: P15692-6)
MNFLLSWVHWSLALLLYLHHAKWSQAAPMAEGGGQNHHEVVKFMDVYQRSYCHPIETLVDIFQEYPDEIEYIFKPSCVPLMRCGGCCNDEGLECVPTEESNITMQIMRIKPHQGQHIGEMSFLQHNKCECRPKKDRARQEKKSVRGKGKGQKRKRKKSRYKSWSVCDKPRR

SEQ ID NO: 89 - skipped

SEQ ID NO: 90 - protein, 191 aa, Artificial Sequence
  VEGF biomarker (UniProt: P15692-8)
MNFLLSWVHWSLALLLYLHHAKWSQAAPMAEGGGQNHHEVVKFMDVYQRSYCHPIETLVDIFQEYPDEIEYIFKPSCVPLMRCGGCCNDEGLECVPTEESNITMQIMRIKPHQGQHIGEMSFLQHNKCECRPKKDRARQENPCGPCSERRKHLFVQDPQTCKCSCKNTDSRCKARQLELNERTCRSLTRKD

SEQ ID NO: 91 - protein, 147 aa, Artificial Sequence
  VEGF biomarker (UniProt: P15692-9)
MNFLLSWVHWSLALLLYLHHAKWSQAAPMAEGGGQNHHEVVKFMDVYQRSYCHPIETLVDIFQEYPDEIEYIFKPSCVPLMRCGGCCNDEGLECVPTEESNITMQIMRIKPHQGQHIGEMSFLQHNKCECRPKKDRARQEKCDKPRR

SEQ ID NO: 92 - protein, 137 aa, Artificial Sequence
  VEGF biomarker (UniProt: P15692-10)
MNFLLSWVHWSLALLLYLHHAKWSQAAPMAEGGGQNHHEVVKFMDVYQRSYCHPIETLVDIFQEYPDEIEYIFKPSCVPLMRCGGCCNDEGLECVPTEESNITMQIMRIKPHQGQHIGEMSFLQHNKCECRCDKPRR

SEQ ID NO: 93 - protein, 371 aa, Artificial Sequence
  VEGF biomarker (UniProt: P15692-11)
MTDRQTDTAPSPSYHLLPGRRRTVDAAASRGQGPEPAPGGGVEGVGARGVALKLFVQLLGCSRFGGAVVRAGEAEPSGAARSASSGREEPQPEEGEEEEEKEEERGPQWRLGARKPGSWTGEAAVCADSAPAARAPQALARASGRGGRVARRGAEESGPPHSPSRRGSASRAGPGRASETMNFLLSWVHWSLALLLYLHHAKWSQAAPMAEGGGQNHHEVVKFMDVYQRSYCHPIETLVDIFQEYPDEIEYIFKPSCVPLMRCGGCCNDEGLECVPTEESNITMQIMRIKPHQGQHIGEMSFLQHNKCECRPKKDRARQENPCGPCSERRKHLFVQDPQTCKCSCKNTDSRCKARQLELNERTCRCDKPRR

SEQ ID NO: 94 - protein, 327 aa, Artificial Sequence
  VEGF biomarker (UniProt: P15692-12)
MTDRQTDTAPSPSYHLLPGRRRTVDAAASRGQGPEPAPGGGVEGVGARGVALKLFVQLLGCSRFGGAVVRAGEAEPSGAARSASSGREEPQPEEGEEEEEKEEERGPQWRLGARKPGSWTGEAAVCADSAPAARAPQALARASGRGGRVARRGAEESGPPHSPSRRGSASRAGPGRASETMNFLLSWVHWSLALLLYLHHAKWSQAAPMAEGGGQNHHEVVKFMDVYQRSYCHPIETLVDIFQEYPDEIEYIFKPSCVPLMRCGGCCNDEGLECVPTEESNITMQIMRIKPHQGQHIGEMSFLQHNKCECRPKKDRARQEKCDKPRR

SEQ ID NO: 95 - protein, 395 aa, Artificial Sequence
  VEGF biomarker (UniProt: P15692-13)
MTDRQTDTAPSPSYHLLPGRRRTVDAAASRGQGPEPAPGGGVEGVGARGVALKLFVQLLGCSRFGGAVVRAGEAEPSGAARSASSGREEPQPEEGEEEEEKEEERGPQWRLGARKPGSWTGEAAVCADSAPAARAPQALARASGRGGRVARRGAEESGPPHSPSRRGSASRAGPGRASETMNFLLSWVHWSLALLLYLHHAKWSQAAPMAEGGGQNHHEVVKFMDVYQRSYCHPIETLVDIFQEYPDEIEYIFKPSCVPLMRCGGCCNDEGLECVPTEESNITMQIMRIKPHQGQHIGEMSFLQHNKCECRPKKDRARQEKKSVRGKGKGQKRKRKKSRYKSWSVPCGPCSERRKHLFVQDPQTCKCSCKNTDSRCKARQLELNERTCRCDKPRR

SEQ ID NO: 96 - protein, 412 aa, Artificial Sequence
  VEGF biomarker (UniProt: P15692-14)
MTDRQTDTAPSPSYHLLPGRRRTVDAAASRGQGPEPAPGGGVEGVGARGVALKLFVQLLGCSRFGGAVVRAGEAEPSGAARSASSGREEPQPEEGEEEEEKEEERGPQWRLGARKPGSWTGEAAVCADSAPAARAPQALARASGRGGRVARRGAEESGPPHSPSRRGSASRAGPGRASETMNFLLSWVHWSLALLLYLHHAKWSQAAPMAEGGGQNHHEVVKFMDVYQRSYCHPIETLVDIFQEYPDEIEYIFKPSCVPLMRCGGCCNDEGLECVPTEESNITMQIMRIKPHQGQHIGEMSFLQHNKCECRPKKDRARQEKKSVRGKGKGQKRKRKKSRYKSWSVYVGARCCLMPWSLPGPHPCGPCSERRKHLFVQDPQTCKCSCKNTDSRCKARQLELNERTCRCDKPRR

SEQ ID NO: 97 - protein, 371 aa, Artificial Sequence
  VEGF biomarker (UniProt: P15692-15)
MTDRQTDTAPSPSYHLLPGRRRTVDAAASRGQGPEPAPGGGVEGVGARGVALKLFVQLLGCSRFGGAVVRAGEAEPSGAARSASSGREEPQPEEGEEEEEKEEERGPQWRLGARKPGSWTGEAAVCADSAPAARAPQALARASGRGGRVARRGAEESGPPHSPSRRGSASRAGPGRASETMNFLLSWVHWSLALLLYLHHAKWSQAAPMAEGGGQNHHEVVKFMDVYQRSYCHPIETLVDIFQEYPDEIEYIFKPSCVPLMRCGGCCNDEGLECVPTEESNITMQIMRIKPHQGQHIGEMSFLQHNKCECRPKKDRARQENPCGPCSERRKHLFVQDPQTCKCSCKNTDSRCKARQLELNERTCRSLTRKD

SEQ ID NO: 98 - protein, 389 aa, Artificial Sequence
  VEGF biomarker (UniProt: P15692-16)
MTDRQTDTAPSPSYHLLPGRRRTVDAAASRGQGPEPAPGGGVEGVGARGVALKLFVQLLGCSRFGGAVVRAGEAEPSGAARSASSGREEPQPEEGEEEEEKEEERGPQWRLGARKPGSWTGEAAVCADSAPAARAPQALARASGRGGRVARRGAEESGPPHSPSRRGSASRAGPGRASETMNFLLSWVHWSLALLLYLHHAKWSQAAPMAEGGGQNHHEVVKFMDVYQRSYCHPIETLVDIFQEYPDEIEYIFKPSCVPLMRCGGCCNDEGLECVPTEESNITMQIMRIKPHQGQHIGEMSFLQHNKCECRPKKDRARQEKKSVRGKGKGQKRKRKKSRPCGPCSERRKHLFVQDPQTCKCSCKNTDSRCKARQLELNERTCRCDKPRR

SEQ ID NO: 99 - protein, 354 aa, Artificial Sequence
  VEGF biomarker (UniProt: P15692-17)
MTDRQTDTAPSPSYHLLPGRRRTVDAAASRGQGPEPAPGGGVEGVGARGVALKLFVQLLGCSRFGGAVVRAGEAEPSGAARSASSGREEPQPEEGEEEEEKEEERGPQWRLGARKPGSWTGEAAVCADSAPAARAPQALARASGRGGRVARRGAEESGPPHSPSRRGSASRAGPGRASETMNFLLSWVHWSLALLLYLHHAKWSQAAPMAEGGGQNHHEVVKFMDVYQRSYCHPIETLVDIFQEYPDEIEYIFKPSCVPLMRCGGCCNDEGLECVPTEESNITMQIMRIKPHQGQHIGEMSFLQHNKCECRPKKDRARQENPCGPCSERRKHLFVQDPQTCKCSCKNTDSRCKM

SEQ ID NO: 100 - protein, 317 aa, Artificial Sequence
  VEGF biomarker (UniProt: P15692-18)
MTDRQTDTAPSPSYHLLPGRRRTVDAAASRGQGPEPAPGGGVEGVGARGVALKLFVQLLGCSRFGGAVVRAGEAEPSGAARSASSGREEPQPEEGEEEEEKEEERGPQWRLGARKPGSWTGEAAVCADSAPAARAPQALARASGRGGRVARRGAEESGPPHSPSRRGSASRAGPGRASETMNFLLSWVHWSLALLLYLHHAKWSQAAPMAEGGGQNHHEVVKFMDVYQRSYCHPIETLVDIFQEYPDEIEYIFKPSCVPLMRCGGCCNDEGLECVPTEESNITMQIMRIKPHQGQHIGEMSFLQHNKCECRCDKPRR

SEQ ID NO: 101 - protein, 107 aa, Artificial Sequence
  GRO-alpha biomarker (UniProt: P09341 (entry version 183)
MARAALSAAPSNPRLLRVALLLLLLVAAGRRAAGASVATELRCQCLQTLQGIHPKNIQSVNVKSPGPHCAQTEVIATLKNGRKACLNPASPIVKKIIEKMLNSDKSN

SEQ ID NO: 102 - protein, 332 aa, Artificial Sequence
  LDH biomarker (UniProt: P00338-1) (entry version 224)
MATLKDQLIYNLLKEEQTPQNKITVVGVGAVGMACAISILMKDLADELALVDVIEDKLKGEMMDLQHGSLFLRTPKIVSGKDYNVTANSKLVIITAGARQQEGESRLNLVQRNVNIFKFIIPNVVKYSPNCKLLIVSNPVDILTYVAWKISGFPKNRVIGSGCNLDSARFRYLMGERLGVHPLSCHGWVLGEHGDSSVPVWSGMNVAGVSLKTLHPDLGTDKDKEQWKEVHKQVVESAYEVIKLKGYTSWAIGLSVADLAESIMKNLRRVHPVSTMIKGLYGIKDDVFLSVPCILGQNGISDLVKVTLTSEEEARLKKSADTLWGIQKELQF

SEQ ID NO: 103 - protein, 274 aa, Artificial Sequence
  LDH biomarker (UniProt: P00338-2)
MATLKDQLIYNLLKEEQTPQNKITVVGVGAVGMACAISILMKDLADELALVDVIEDKLKGEMMDLQHGSLFLRTPKIVSGKDYNVTANSKLVIITAGARQQEGESRLNLVQRNVNIFKFIIPNVVKYSPNCKLLIVSNPVDILTYVAWKISGFPKNRVIGSGCNLDSARFRYLMGERLGVHPLSCHGWVLGEHGDSSVPVWSGMNVAGVSLKTLHPDLGTDKDKEQWKECRYTLGDPKGAAILKSSDVISFHCLGYNRILGGGCACCPFYLICD

SEQ ID NO: 104 - protein, 361 aa, Artificial Sequence
  LDH biomarker (UniProt: P00338-3
MGEPSGGYTYTQTSIFLFHAKIPFGSKSNMATLKDQLIYNLLKEEQTPQNKITVVGVGAVGMACAISILMKDLADELALVDVIEDKLKGEMMDLQHGSLFLRTPKIVSGKDYNVTANSKLVIITAGARQQEGESRLNLVQRNVNIFKFIIPNVVKYSPNCKLLIVSNPVDILTYVAWKISGFPKNRVIGSGCNLDSARFRYLMGERLGVHPLSCHGWVLGEHGDSSVPVWSGMNVAGVSLKTLHPDLGTDKDKEQWKEVHKQVVESAYEVIKLKGYTSWAIGLSVADLAESIMKNLRRVHPVSTMIKGLYGIKDDVFLSVPCILGQNGISDLVKVTLTSEEEARLKKSADTLWGIQKELQF

SEQ ID NO: 105 - protein, 274 aa, Artificial Sequence
  LDH biomarker (UniProt: P00338-4)
MATLKDQLIYNLLKEEQTPQNKITVVGVGAVGMACAISILMKDLADELALVDVIEDKLKGEMMDLQHGSLFLRTPKIVSGKVDILTYVAWKISGFPKNRVIGSGCNLDSARFRYLMGERLGVHPLSCHGWVLGEHGDSSVPVWSGMNVAGVSLKTLHPDLGTDKDKEQWKEVHKQVVESAYEVIKLKGYTSWAIGLSVADLAESIMKNLRRVHPVSTMIKGLYGIKDDVFLSVPCILGQNGISDLVKVTLTSEEEARLKKSADTLWGIQKELQF

SEQ ID NO: 106 - protein, 241 aa, Artificial Sequence
  LDH biomarker (UniProt: P00338-5)
MATLKDQLIYNLLKEEQTPQNKITVVGVGAVGMACAISILMKDLADELALVDVIEDKLKGEMMDLQHGSLFLRTPKIVSGKDYNVTANSKLVIITAGARQQEGESRLNLVQRNVNIFKFIIPNVVKYSPNCKLLIVSNPVDILTYVAWKISGFPKNRVIGSGCNLDSARFRYLMGERLGVHPLSCHGWVLGEHGDSSVPVWSGMNVAGVSLKTLHPDLGTDKDKEQWKEVHKQVVERVFTE

SEQ ID NO: 107 - protein, 334 aa, Artificial Sequence
  LDH biomarker (UniProt: P07195-1) (entry version 218)
MATLKEKLIAPVAEEEATVPNNKITVVGVGQVGMACAISILGKSLADELALVDVLEDKLKGEMMDLQHGSLFLQTPKIVADKDYSVTANSKIVVVTAGVRQQEGESRLNLVQRNVNVFKFIIPQIVKYSPDCIIIVVSNPVDILTYVTWKLSGLPKHRVIGSGCNLDSARFRYLMAEKLGIHPSSCHGWILGEHGDSSVAVWSGVNVAGVSLQELNPEMGTDNDSENWKEVHKMVVESAYEVIKLKGYTNWAIGLSVADLIESMLKNLSRIHPVSTMVKGMYGIENEVFLSLPCILNARGLTSVINQKLKDDEVAQLKKSADTLWDIQKDLKDL

SEQ ID NO: 108 - protein, 918 aa, Artificial Sequence
  IL-6R beta biomarker (UniProt: P40189-1) (entry version 209)
MLTLQTWLVQALFIFLTTESTGELLDPCGYISPESPVVQLHSNFTAVCVLKEKCMDYFHVNANYIVWKTNHFTIPKEQYTIINRTASSVTFTDIASLNIQLTCNILTFGQLEQNVYGITIISGLPPEKPKNLSCIVNEGKKMRCEWDGGRETHLETNFTLKSEWATHKFADCKAKRDTPTSCTVDYSTVYFVNIEVWVEAENALGKVTSDHINFDPVYKVKPNPPHNLSVINSEELSSILKLTWTNPSIKSVIILKYNIQYRTKDASTWSQIPPEDTASTRSSFTVQDLKPFTEYVFRIRCMKEDGKGYWSDWSEEASGITYEDRPSKAPSFWYKIDPSHTQGYRTVQLVWKTLPPFEANGKILDYEVTLTRWKSHLQNYTVNATKLTVNLTNDRYLATLTVRNLVGKSDAAVLTIPACDFQATHPVMDLKAFPKDNMLWVEWTTPRESVKKYILEWCVLSDKAPCITDWQQEDGTVHRTYLRGNLAESKCYLITVTPVYADGPGSPESIKAYLKQAPPSKGPTVRTKKVGKNEAVLEWDQLPVDVQNGFIRNYTIFYRTIIGNETAVNVDSSHTEYTLSSLTSDTLYMVRMAAYTDEGGKDGPEFTFTTPKFAQGEIEAIVVPVCLAFLLTTLLGVLFCFNKRDLIKKHIWPNVPDPSKSHIAQWSPHTPPRHNFNSKDQMYSDGNFTDVSVVEIEANDKKPFPEDLKSLDLFKKEKINTEGHSSGIGGSSCMSSSRPSISSSDENESSQNTSSTVQYSTVVHSGYRHQVPSVQVFSRSESTQPLLDSEERPEDLQLVDHVDGGDGILPRQQYFKQNCSQHESSPDISHFERSKQVSSVNEEDFVRLKQQISDHISQSCGSGQMKMFQEVSAADAFGPGTEGQVERFETVGMEAATDEGMPKSYLPQTVRQGGYMPQ

SEQ ID NO: 109 - protein, 329 aa, Artificial Sequence
  IL-6R beta biomarker (UniProt: P40189-2)
MLTLQTWLVQALFIFLTTESTGELLDPCGYISPESPVVQLHSNFTAVCVLKEKCMDYFHVNANYIVWKTNHFTIPKEQYTIINRTASSVTFTDIASLNIQLTCNILTFGQLEQNVYGITIISGLPPEKPKNLSCIVNEGKKMRCEWDGGRETHLETNFTLKSEWATHKFADCKAKRDTPTSCTVDYSTVYFVNIEVWVEAENALGKVTSDHINFDPVYKVKPNPPHNLSVINSEELSSILKLTWTNPSIKSVIILKYNIQYRTKDASTWSQIPPEDTASTRSSFTVQDLKPFTEYVFRIRCMKEDGKGYWSDWSEEASGITYEDNIASF

SEQ ID NO: 110 - protein, 532 aa, Artificial Sequence
  ICAM-1 biomarker (UniProt: P05362) (entry version 187)
MAPSSPRPALPALLVLLGALFPGPGNAQTSVSPSKVILPRGGSVLVTCSTSCDQPKLLGIETPLPKKELLLPGNNRKVYELSNVQEDSQPMCYSNCPDGQSTAKTFLTVYWTPERVELAPLPSWQPVGKNLTLRCQVEGGAPRANLTVVLLRGEKELKREPAVGEPAEVTTTVLVRRDHHGANFSCRTELDLRPQGLELFENTSAPYQLQTFVLPATPPQLVSPRVLEVDTQGTVVCSLDGLFPVSEAQVHLALGDQRLNPTVTYGNDSFSAKASVSVTAEDEGTQRLTCAVILGNQSQETLQTVTIYSFPAPNVILTKPEVSEGTEVTVKCEAHPRAKVTLNGVPAQPLGPRAQLLLKATPEDNGRSFSCSATLEVAGQLIHKNQTRELRVLYGPRLDERDCPGNWTWPENSQQTPMCQAWGNPLPELKCLKDGTFPLPIGESVTVTRDLEGTYLCRARSTQGEVTRKVTVNVLSPRYEIVIITVVAAAVIMGTAGLSTYLYNRQRKIKKYRLQQAQKGTPMKPNTQATPP

SEQ ID NO: 111 - protein, 92 aa, Artificial Sequence
  MI-1 beta biomarker (UniProt: P13236) (entry version 187)
MKLCVTVLSLLMLVAAFCSPALSAPMGSDPPTACCFSYTARKLPRNFVVDYYETSSLCSQPAVVFQTKRSKQVCADPSESWVQEYVYDLELN

SEQ ID NO: 112 - protein, 836 aa, Artificial Sequence
  Periostin biomarker (UniProt: Q15063-1) (entry version 160)
MIPFLPMFSLLLLLIVNPINANNHYDKILAHSRIRGRDQGPNVCALQQILGTKKKYFSTCKNWYKKSICGQKTTVLYECCPGYMRMEGMKGCPAVLPIDHVYGTLGIVGATTTQRYSDASKLREEIEGKGSFTYFAPSNEAWDNLDSDIRRGLESNVNVELLNALHSHMINKRMLTKDLKNGMIIPSMYNNLGLFINHYPNGVVTVNCARIIHGNQIATNGVVHVIDRVLTQIGTSIQDFIEAEDDLSSFRAAAITSDILEALGRDGHFTLFAPTNEAFEKLPRGVLERIMGDKVASEALMKYHILNTLQCSESIMGGAVFETLEGNTIEIGCDGDSITVNGIKMVNKKDIVTNNGVIHLIDQVLIPDSAKQVIELAGKQQTTFTDLVAQLGLASALRPDGEYTLLAPVNNAFSDDTLSMDQRLLKLILQNHILKVKVGLNELYNGQILETIGGKQLRVFVYRTAVCIENSCMEKGSKQGRNGAIHIFREIIKPAEKSLHEKLKQDKRFSTFLSLLEAADLKELLTQPGDWTLFVPTNDAFKGMTSEEKEILIRDKNALQNIILYHLTPGVFIGKGFEPGVTNILKTTQGSKIFLKEVNDTLLVNELKSKESDIMTTNGVIHVVDKLLYPADTPVGNDQLLEILNKLIKYIQIKFVRGSTFKEIPVTVYTTKIITKVVEPKIKVIEGSLQPIIKTEGPTLTKVKIEGEPEFRLIKEGETITEVIHGEPIIKKYTKIIDGVPVEITEKETREERIITGPEIKYTRISTGGGETEETLKKLLQEEVTKVTKFIEGGDGHLFEDEEIKRLLQGDTPVRKLQANKKVQGSRRRLREGRSQ

SEQ ID NO: 113 - protein, 779 aa, Artificial Sequence
  Periostin biomarker (UniProt: Q15063-2)
MIPFLPMFSLLLLLIVNPINANNHYDKILAHSRIRGRDQGPNVCALQQILGTKKKYFSTCKNWYKKSICGQKTTVLYECCPGYMRMEGMKGCPAVLPIDHVYGTLGIVGATTTQRYSDASKLREEIEGKGSFTYFAPSNEAWDNLDSDIRRGLESNVNVELLNALHSHMINKRMLTKDLKNGMIIPSMYNNLGLFINHYPNGVVTVNCARIIHGNQIATNGVVHVIDRVLTQIGTSIQDFIEAEDDLSSFRAAAITSDILEALGRDGHFTLFAPTNEAFEKLPRGVLERIMGDKVASEALMKYHILNTLQCSESIMGGAVFETLEGNTIEIGCDGDSITVNGIKMVNKKDIVTNNGVIHLIDQVLIPDSAKQVIELAGKQQTTFTDLVAQLGLASALRPDGEYTLLAPVNNAFSDDTLSMDQRLLKLILQNHILKVKVGLNELYNGQILETIGGKQLRVFVYRTAVCIENSCMEKGSKQGRNGAIHIFREIIKPAEKSLHEKLKQDKRFSTFLSLLEAADLKELLTQPGDWTLFVPTNDAFKGMTSEEKEILIRDKNALQNIILYHLTPGVFIGKGFEPGVTNILKTTQGSKIFLKEVNDTLLVNELKSKESDIMTTNGVIHVVDKLLYPADTPVGNDQLLEILNKLIKYIQIKFVRGSTFKEIPVTVYKPIIKKYTKIIDGVPVEITEKETREERIITGPEIKYTRISTGGGETEETLKKLLQEEVTKVTKFIEGGDGHLFEDEEIKRLLQGDTPVRKLQANKKVQGSRRRLREGRSQ

SEQ ID NO: 114 - protein, 781 aa, Artificial Sequence
  Periostin biomarker (UniProt: Q15063-3)
MIPFLPMFSLLLLLIVNPINANNHYDKILAHSRIRGRDQGPNVCALQQILGTKKKYFSTCKNWYKKSICGQKTTVLYECCPGYMRMEGMKGCPAVLPIDHVYGTLGIVGATTTQRYSDASKLREEIEGKGSFTYFAPSNEAWDNLDSDIRRGLESNVNVELLNALHSHMINKRMLTKDLKNGMIIPSMYNNLGLFINHYPNGVVTVNCARIIHGNQIATNGVVHVIDRVLTQIGTSIQDFIEAEDDLSSFRAAAITSDILEALGRDGHFTLFAPTNEAFEKLPRGVLERIMGDKVASEALMKYHILNTLQCSESIMGGAVFETLEGNTIEIGCDGDSITVNGIKMVNKKDIVTNNGVIHLIDQVLIPDSAKQVIELAGKQQTTFTDLVAQLGLASALRPDGEYTLLAPVNNAFSDDTLSMDQRLLKLILQNHILKVKVGLNELYNGQILETIGGKQLRVFVYRTAVCIENSCMEKGSKQGRNGAIHIFREIIKPAEKSLHEKLKQDKRFSTFLSLLEAADLKELLTQPGDWTLFVPTNDAFKGMTSEEKEILIRDKNALQNIILYHLTPGVFIGKGFEPGVTNILKTTQGSKIFLKEVNDTLLVNELKSKESDIMTTNGVIHVVDKLLYPADTPVGNDQLLEILNKLIKYIQIKFVRGSTFKEIPVTVYRPTLTKVKIEGEPEFRLIKEGETITEVIHGEPIIKKYTKIIDGVPVEITEKETREERIITGPEIKYTRISTGGGETEETLKKLLQEDTPVRKLQANKKVQGSRRRLREGRSQ

SEQ ID NO: 115 - protein, 751 aa, Artificial Sequence
  Periostin biomarker (UniProt: Q15063-4)
MIPFLPMFSLLLLLIVNPINANNHYDKILAHSRIRGRDQGPNVCALQQILGTKKKYFSTCKNWYKKSICGQKTTVLYECCPGYMRMEGMKGCPAVLPIDHVYGTLGIVGATTTQRYSDASKLREEIEGKGSFTYFAPSNEAWDNLDSDIRRGLESNVNVELLNALHSHMINKRMLTKDLKNGMIIPSMYNNLGLFINHYPNGVVTVNCARIIHGNQIATNGVVHVIDRVLTQIGTSIQDFIEAEDDLSSFRAAAITSDILEALGRDGHFTLFAPTNEAFEKLPRGVLERIMGDKVASEALMKYHILNTLQCSESIMGGAVFETLEGNTIEIGCDGDSITVNGIKMVNKKDIVTNNGVIHLIDQVLIPDSAKQVIELAGKQQTTFTDLVAQLGLASALRPDGEYTLLAPVNNAFSDDTLSMDQRLLKLILQNHILKVKVGLNELYNGQILETIGGKQLRVFVYRTAVCIENSCMEKGSKQGRNGAIHIFREIIKPAEKSLHEKLKQDKRFSTFLSLLEAADLKELLTQPGDWTLFVPTNDAFKGMTSEEKEILIRDKNALQNIILYHLTPGVFIGKGFEPGVTNILKTTQGSKIFLKEVNDTLLVNELKSKESDIMTTNGVIHVVDKLLYPADTPVGNDQLLEILNKLIKYIQIKFVRGSTFKEIPVTVYKPIIKKYTKIIDGVPVEITEKETREERIITGPEIKYTRISTGGGETEETLKKLLQEDTPVRKLQANKKVQGSRRRLREGRSQ

SEQ ID NO: 116 - protein, 809 aa, Artificial Sequence
  Periostin biomarker (UniProt: Q15063-5)
MIPFLPMFSLLLLLIVNPINANNHYDKILAHSRIRGRDQGPNVCALQQILGTKKKYFSTCKNWYKKSICGQKTTVLYECCPGYMRMEGMKGCPAVLPIDHVYGTLGIVGATTTQRYSDASKLREEIEGKGSFTYFAPSNEAWDNLDSDIRRGLESNVNVELLNALHSHMINKRMLTKDLKNGMIIPSMYNNLGLFINHYPNGVVTVNCARIIHGNQIATNGVVHVIDRVLTQIGTSIQDFIEAEDDLSSFRAAAITSDILEALGRDGHFTLFAPTNEAFEKLPRGVLERIMGDKVASEALMKYHILNTLQCSESIMGGAVFETLEGNTIEIGCDGDSITVNGIKMVNKKDIVTNNGVIHLIDQVLIPDSAKQVIELAGKQQTTFTDLVAQLGLASALRPDGEYTLLAPVNNAFSDDTLSMDQRLLKLILQNHILKVKVGLNELYNGQILETIGGKQLRVFVYRTAVCIENSCMEKGSKQGRNGAIHIFREIIKPAEKSLHEKLKQDKRFSTFLSLLEAADLKELLTQPGDWTLFVPTNDAFKGMTSEEKEILIRDKNALQNIILYHLTPGVFIGKGFEPGVTNILKTTQGSKIFLKEVNDTLLVNELKSKESDIMTTNGVIHVVDKLLYPADTPVGNDQLLEILNKLIKYIQIKFVRGSTFKEIPVTVYRPTLTKVKIEGEPEFRLIKEGETITEVIHGEPIIKKYTKIIDGVPVEITEKETREERIITGPEIKYTRISTGGGETEETLKKLLQEEVTKVTKFIEGGDGHLFEDEEIKRLLQGDTPVRKLQANKKVQGSRRRLREGRSQ

SEQ ID NO: 117 - protein, 749 aa, Artificial Sequence
  Periostin biomarker (UniProt: Q15063-6)
MIPFLPMFSLLLLLIVNPINANNHYDKILAHSRIRGRDQGPNVCALQQILGTKKKYFSTCKNWYKKSICGQKTTVLYECCPGYMRMEGMKGCPAVLPIDHVYGTLGIVGATTTQRYSDASKLREEIEGKGSFTYFAPSNEAWDNLDSDIRRGLESNVNVELLNALHSHMINKRMLTKDLKNGMIIPSMYNNLGLFINHYPNGVVTVNCARIIHGNQIATNGVVHVIDRVLTQIGTSIQDFIEAEDDLSSFRAAAITSDILEALGRDGHFTLFAPTNEAFEKLPRGVLERIMGDKVASEALMKYHILNTLQCSESIMGGAVFETLEGNTIEIGCDGDSITVNGIKMVNKKDIVTNNGVIHLIDQVLIPDSAKQVIELAGKQQTTFTDLVAQLGLASALRPDGEYTLLAPVNNAFSDDTLSMDQRLLKLILQNHILKVKVGLNELYNGQILETIGGKQLRVFVYRTAVCIENSCMEKGSKQGRNGAIHIFREIIKPAEKSLHEKLKQDKRFSTFLSLLEAADLKELLTQPGDWTLFVPTNDAFKGMTSEEKEILIRDKNALQNIILYHLTPGVFIGKGFEPGVTNILKTTQGSKIFLKEVNDTLLVNELKSKESDIMTTNGVIHVVDKLLYPADTPVGNDQLLEILNKLIKYIQIKFVRGSTFKEIPVTVYSPEIKYTRISTGGGETEETLKKLLQEEVTKVTKFIEGGDGHLFEDEEIKRLLQGDTPVRKLQANKKVQGSRRRLREGRSQ

SEQ ID NO: 118 - protein, 721 aa, Artificial Sequence
  Periostin biomarker (UniProt: Q15063-7)
MIPFLPMFSLLLLLIVNPINANNHYDKILAHSRIRGRDQGPNVCALQQILGTKKKYFSTCKNWYKKSICGQKTTVLYECCPGYMRMEGMKGCPAVLPIDHVYGTLGIVGATTTQRYSDASKLREEIEGKGSFTYFAPSNEAWDNLDSDIRRGLESNVNVELLNALHSHMINKRMLTKDLKNGMIIPSMYNNLGLFINHYPNGVVTVNCARIIHGNQIATNGVVHVIDRVLTQIGTSIQDFIEAEDDLSSFRAAAITSDILEALGRDGHFTLFAPTNEAFEKLPRGVLERIMGDKVASEALMKYHILNTLQCSESIMGGAVFETLEGNTIEIGCDGDSITVNGIKMVNKKDIVTNNGVIHLIDQVLIPDSAKQVIELAGKQQTTFTDLVAQLGLASALRPDGEYTLLAPVNNAFSDDTLSMDQRLLKLILQNHILKVKVGLNELYNGQILETIGGKQLRVFVYRTAVCIENSCMEKGSKQGRNGAIHIFREIIKPAEKSLHEKLKQDKRFSTFLSLLEAADLKELLTQPGDWTLFVPTNDAFKGMTSEEKEILIRDKNALQNIILYHLTPGVFIGKGFEPGVTNILKTTQGSKIFLKEVNDTLLVNELKSKESDIMTTNGVIHVVDKLLYPADTPVGNDQLLEILNKLIKYIQIKFVRGSTFKEIPVTVYSPEIKYTRISTGGGETEETLKKLLQEDTPVRKLQANKKVQGSRRRLREGRSQ

SEQ ID NO: 119 - protein, 189 aa, Artificial Sequence
  IL-23 biomarker (UniProt: Q9NPF7) (entry version 133)
MLGSRAVMLLLLLPWTAQGRAVPGGSSPAWTQCQQLSQKLCTLAWSAHPLVGHMDLREEGDEETTNDVPHIQCGDGCDPQGLRDNSQFCLQRIHQGLIFYEKLLGSDIFTGEPSLLPDSPVGQLHASLLGLSQLLQPEGHHWETQQIPSLSPSQPWQRLLLRFKILRSLQAFVAVAARVFAHGAATLSP

SEQ ID NO: 120 - protein, 243 aa, Artificial Sequence
  FOLR3 biomarker (P41439-1) (entry version 127)
MAWQMMQLLLLALVTAAGSAQPRSARARTDLLNVCMNAKHHKTQPSPEDELYGQCSPWKKNACCTASTSQELHKDTSRLYNFNWDHCGKMEPTCKRHFIQDSCLYECSPNLGPWIRQVNQSWRKERILNVPLCKEDCERWWEDCRTSYTCKSNWHKGWNWTSGINECPAGALCSTFESYFPTPAALCEGLWSHSFKVSNYSRGSGRCIQMWFDSAQGNPNEEVAKFYAAAMNAGAPSRGIIDS

SEQ ID NO: 121 - protein, 104 aa, Artificial Sequence
  FOLR3 biomarker (P41439-2)
MAWQMMQLLLLALVTAAGSAQPRSARARTDLLNVCMNAKHHKTQPSPEDELYGQCSPWKKNACCTASTSQELHKDTSRLYNFNWDHCGKMEPTCKRHFIQDSCL

SEQ ID NO: 122 - protein, 285 aa, Artificial Sequence
  FOLR3 biomarker (P41439-3)
MAWQMMQLLLLALVTAAGSAQPRSARARTDLLNVCMNAKHHKTQPSPEDELYGQVGAPQGPSPGSVPLDDLPGAEEPEYGGDGCGGERLSPVSSPPSAVPGRRMPAARPAPARSCTRTPPACTTLTGITVVRWNPPASATLSRTAVSECSPNLGPWIRQVNQSWRKERILNVPLCKEDCERWWEDCRTSYTCKSNWHKGWNWTSGINECPAGALCSTFESYFPTPAALCEGLWSHSFKVSNYSRGSGRCIQMWFDSAQGNPNEEVAKFYAAAMNAGAPSRGIIDS

SEQ ID NO: 123 - protein, 449 aa, Artificial Sequence
  CLU biomarker (UniProt: P10909-1) (entry version 209)
MMKTLLLFVGLLLTWESGQVLGDQTVSDNELQEMSNQGSKYVNKEIQNAVNGVKQIKTLIEKTNEERKTLLSNLEEAKKKKEDALNETRESETKLKELPGVCNETMMALWEECKPCLKQTCMKFYARVCRSGSGLVGRQLEEFLNQSSPFYFWMNGDRIDSLLENDRQQTHMLDVMQDHFSRASSIIDELFQDRFFTREPQDTYHYLPFSLPHRRPHFFFPKSRIVRSLMPFSPYEPLNFHAMFQPFLEMIHEAQQAMDIHFHSPAFQHPPTEFIREGDDDRTVCREIRHNSTGCLRMKDQCDKCREILSVDCSTNNPSQAKLRRELDESLQVAERLTRKYNELLKSYQWKMLNTSSLLEQLNEQFNWVSRLANLTQGEDQYYLRVTTVASHTSDSDVPSGVTEVVVKLFDSDPITVTVPVEVSRKNPKFMETVAEKALQEYRKKHREE

SEQ ID NO: 124 - protein, 501 aa, Artificial Sequence
  CLU biomarker (UniProt: P10909-2)
MQVCSQPQRGCVREQSAINTAPPSAHNAASPGGARGHRVPLTEACKDSRIGGMMKTLLLFVGLLLTWESGQVLGDQTVSDNELQEMSNQGSKYVNKEIQNAVNGVKQIKTLIEKTNEERKTLLSNLEEAKKKKEDALNETRESETKLKELPGVCNETMMALWEECKPCLKQTCMKFYARVCRSGSGLVGRQLEEFLNQSSPFYFWMNGDRIDSLLENDRQQTHMLDVMQDHFSRASSIIDELFQDRFFTREPQDTYHYLPFSLPHRRPHFFFPKSRIVRSLMPFSPYEPLNFHAMFQPFLEMIHEAQQAMDIHFHSPAFQHPPTEFIREGDDDRTVCREIRHNSTGCLRMKDQCDKCREILSVDCSTNNPSQAKLRRELDESLQVAERLTRKYNELLKSYQWKMLNTSSLLEQLNEQFNWVSRLANLTQGEDQYYLRVTTVASHTSDSDVPSGVTEVVVKLFDSDPITVTVPVEVSRKNPKFMETVAEKALQEYRKKHREE

SEQ ID NO: 125 - protein, 274 aa, Artificial Sequence
  CLU biomarker (UniProt: P10909-3)
MQDHFSRASSIIDELFQDRFFTREPQDTYHYLPFSLPHRRPHFFFPKSRIVRSLMPFSPYEPLNFHAMFQPFLEMIHEAQQAMDIHFHSPAFQHPPTEFIREGDDDRTVCREIRHNSTGCLRMKDQCDKCREILSVDCSTNNPSQAKLRRELDESLQVAERLTRKYNELLKSYQWKMLNTSSLLEQLNEQFNWVSRLANLTQGEDQYYLRVTTVASHTSDSDVPSGVTEVVVKLFDSDPITVTVPVEVSRKNPKFMETVAEKALQEYRKKHREE

SEQ ID NO: 126 - protein, 416 aa, Artificial Sequence
  CLU biomarker (UniProt: P10909-4)
MSNQGSKYVNKEIQNAVNGVKQIKTLIEKTNEERKTLLSNLEEAKKKKEDALNETRESETKLKELPGVCNETMMALWEECKPCLKQTCMKFYARVCRSGSGLVGRQLEEFLNQSSPFYFWMNGDRIDSLLENDRQQTHMLDVMQDHFSRASSIIDELFQDRFFTREPQDTYHYLPFSLPHRRPHFFFPKSRIVRSLMPFSPYEPLNFHAMFQPFLEMIHEAQQAMDIHFHSPAFQHPPTEFIREGDDDRTVCREIRHNSTGCLRMKDQCDKCREILSVDCSTNNPSQAKLRRELDESLQVAERLTRKYNELLKSYQWKMLNTSSLLEQLNEQFNWVSRLANLTQGEDQYYLRVTTVASHTSDSDVPSGVTEVVVKLFDSDPITVTVPVEVSRKNPKFMETVAEKALQEYRKKHREE

SEQ ID NO: 127 - protein, 460 aa, Artificial Sequence
  CLU biomarker (UniProt: P10909-5)
MEACKDSRIGGMMKTLLLFVGLLLTWESGQVLGDQTVSDNELQEMSNQGSKYVNKEIQNAVNGVKQIKTLIEKTNEERKTLLSNLEEAKKKKEDALNETRESETKLKELPGVCNETMMALWEECKPCLKQTCMKFYARVCRSGSGLVGRQLEEFLNQSSPFYFWMNGDRIDSLLENDRQQTHMLDVMQDHFSRASSIIDELFQDRFFTREPQDTYHYLPFSLPHRRPHFFFPKSRIVRSLMPFSPYEPLNFHAMFQPFLEMIHEAQQAMDIHFHSPAFQHPPTEFIREGDDDRTVCREIRHNSTGCLRMKDQCDKCREILSVDCSTNNPSQAKLRRELDESLQVAERLTRKYNELLKSYQWKMLNTSSLLEQLNEQFNWVSRLANLTQGEDQYYLRVTTVASHTSDSDVPSGVTEVVVKLFDSDPITVTVPVEVSRKNPKFMETVAEKALQEYRKKHREE

SEQ ID NO: 128 - protein, 281 aa, Artificial Sequence
  FasL (UniProt: P48023-1) (entry version 197)
MQQPFNYPYPQIYWVDSSASSPWAPPGTVLPCPTSVPRRPGQRRPPPPPPPPPLPPPPPPPPLPPLPLPPLKKRGNHSTGLCLLVMFFMVLVALVGLGLGMFQLFHLQKELAELRESTSQMHTASSLEKQIGHPSPPPEKKELRKVAHLTGKSNSRSMPLEWEDTYGIVLLSGVKYKKGGLVINETGLYFVYSKVYFRGQSCNNLPLSHKVYMRNSKYPQDLVMMEGKMMSYCTTGQMWARSSYLGAVFNLTSADHLYVNVSELSLVNFEESQTFFGLYKL

SEQ ID NO: 129 - protein, 127 aa, Artificial Sequence
  FasL (UniProt: P48023-2)
MQQPFNYPYPQIYWVDSSASSPWAPPGTVLPCPTSVPRRPGQRRPPPPPPPPPLPPPPPPPPLPPLPLPPLKKRGNHSTGLCLLVMFFMVLVALVGLGLGMFQLFHLQKELAELREATPVHPLKKRS

SEQ ID NO: 130 - protein, 770 aa, Artificial Sequence
  AB-40 biomarker (UniProt: P05067-1) (entry version 271)
MLPGLALLLLAAWTARALEVPTDGNAGLLAEPQIAMFCGRLNMHMNVQNGKWDSDPSGTKTCIDTKEGILQYCQEVYPELQITNVVEANQPVTIQNWCKRGRKQCKTHPHFVIPYRCLVGEFVSDALLVPDKCKFLHQERMDVCETHLHWHTVAKETCSEKSTNLHDYGMLLPCGIDKFRGVEFVCCPLAEESDNVDSADAEEDDSDVWWGGADTDYADGSEDKVVEVAEEEEVAEVEEEEADDDEDDEDGDEVEEEAEEPYEEATERTTSIATTTTTTTESVEEVVREVCSEQAETGPCRAMISRWYFDVTEGKCAPFFYGGCGGNRNNFDTEEYCMAVCGSAMSQSLLKTTQEPLARDPVKLPTTAASTPDAVDKYLETPGDENEHAHFQKAKERLEAKHRERMSQVMREWEEAERQAKNLPKADKKAVIQHFQEKVESLEQEAANERQQLVETHMARVEAMLNDRRRLALENYITALQAVPPRPRHVFNMLKKYVRAEQKDRQHTLKHFEHVRMVDPKKAAQIRSQVMTHLRVIYERMNQSLSLLYNVPAVAEEIQDEVDELLQKEQNYSDDVLANMISEPRISYGNDALMPSLTETKTTVELLPVNGEFSLDDLQPWHSFGADSVPANTENEVEPVDARPAADRGLTTRPGSGLTNIKTEEISEVKMDAEFRHDSGYEVHHQKLVFFAEDVGSNKGAIIGLMVGGVVIATVIVITLVMLKKKQYTSIHHGVVEVDAAVTPEERHLSKMQQNGYENPTYKFFEQMQN

SEQ ID NO: 131 - protein, 305 aa, Artificial Sequence
  AB-40 biomarker (UniProt: P05067-2)
MLPGLALLLLAAWTARALEVPTDGNAGLLAEPQIAMFCGRLNMHMNVQNGKWDSDPSGTKTCIDTKEGILQYCQEVYPELQITNVVEANQPVTIQNWCKRGRKQCKTHPHFVIPYRCLVGEFVSDALLVPDKCKFLHQERMDVCETHLHWHTVAKETCSEKSTNLHDYGMLLPCGIDKFRGVEFVCCPLAEESDNVDSADAEEDDSDVWWGGADTDYADGSEDKVVEVAEEEEVAEVEEEEADDDEDDEDGDEVEEEAEEPYEEATERTTSIATTTTTTTESVEEVVREKWYKEVHSGQARWLML

SEQ ID NO: 132 - protein, 677 aa, Artificial Sequence
  AB-40 biomarker (UniProt: P05067-3)
MLPGLALLLLAAWTARALEVPTDGNAGLLAEPQIAMFCGRLNMHMNVQNGKWDSDPSGTKTCIDTKEGILQYCQEVYPELQITNVVEANQPVTIQNWCKRGRKQCKTHPHFVIPYRCLVGEFVSDALLVPDKCKFLHQERMDVCETHLHWHTVAKETCSEKSTNLHDYGMLLPCGIDKFRGVEFVCCPLAEESDNVDSADAEEDDSDVWWGGADTDYADGSEDKVVEVAEEEEVAEVEEEEADDDEDDEDGDEVEEEAEEPYEEATERTTSIATTTTTTTESVEEVVRVPTTAASTPDAVDKYLETPGDENEHAHFQKAKERLEAKHRERMSQVMREWEEAERQAKNLPKADKKAVIQHFQEKVESLEQEAANERQQLVETHMARVEAMLNDRRRLALENYITALQAVPPRPRHVFNMLKKYVRAEQKDRQHTLKHFEHVRMVDPKKAAQIRSQVMTHLRVIYERMNQSLSLLYNVPAVAEEIQDEVDELLQKEQNYSDDVLANMISEPRISYGNDALMPSLTETKTTVELLPVNGEFSLDDLQPWHSFGADSVPANTENEGSGLTNIKTEEISEVKMDAEFRHDSGYEVHHQKLVFFAEDVGSNKGAIIGLMVGGVVIATVIVITLVMLKKKQYTSIHHGVVEVDAAVTPEERHLSKMQQNGYENPTYKFFEQMQN

SEQ ID NO: 133 - protein, 695 aa, Artificial Sequence
  AB-40 biomarker (UniProt: P05067-4)
MLPGLALLLLAAWTARALEVPTDGNAGLLAEPQIAMFCGRLNMHMNVQNGKWDSDPSGTKTCIDTKEGILQYCQEVYPELQITNVVEANQPVTIQNWCKRGRKQCKTHPHFVIPYRCLVGEFVSDALLVPDKCKFLHQERMDVCETHLHWHTVAKETCSEKSTNLHDYGMLLPCGIDKFRGVEFVCCPLAEESDNVDSADAEEDDSDVWWGGADTDYADGSEDKVVEVAEEEEVAEVEEEEADDDEDDEDGDEVEEEAEEPYEEATERTTSIATTTTTTTESVEEVVRVPTTAASTPDAVDKYLETPGDENEHAHFQKAKERLEAKHRERMSQVMREWEEAERQAKNLPKADKKAVIQHFQEKVESLEQEAANERQQLVETHMARVEAMLNDRRRLALENYITALQAVPPRPRHVFNMLKKYVRAEQKDRQHTLKHFEHVRMVDPKKAAQIRSQVMTHLRVIYERMNQSLSLLYNVPAVAEEIQDEVDELLQKEQNYSDDVLANMISEPRISYGNDALMPSLTETKTTVELLPVNGEFSLDDLQPWHSFGADSVPANTENEVEPVDARPAADRGLTTRPGSGLTNIKTEEISEVKMDAEFRHDSGYEVHHQKLVFFAEDVGSNKGAIIGLMVGGVVIATVIVITLVMLKKKQYTSIHHGVVEVDAAVTPEERHLSKMQQNGYENPTYKFFEQMQN

SEQ ID NO: 134 - protein, 696 aa, Artificial Sequence
  AB-40 biomarker (UniProt: P05067-5)
MLPGLALLLLAAWTARALEVPTDGNAGLLAEPQIAMFCGRLNMHMNVQNGKWDSDPSGTKTCIDTKEGILQYCQEVYPELQITNVVEANQPVTIQNWCKRGRKQCKTHPHFVIPYRCLVGEFVSDALLVPDKCKFLHQERMDVCETHLHWHTVAKETCSEKSTNLHDYGMLLPCGIDKFRGVEFVCCPLAEESDNVDSADAEEDDSDVWWGGADTDYADGSEDKVVEVAEEEEVAEVEEEEADDDEDDEDGDEVEEEAEEPYEEATERTTSIATTTTTTTESVEEVVRVSQSLLKTTQEPLARDPVKLPTTAASTPDAVDKYLETPGDENEHAHFQKAKERLEAKHRERMSQVMREWEEAERQAKNLPKADKKAVIQHFQEKVESLEQEAANERQQLVETHMARVEAMLNDRRRLALENYITALQAVPPRPRHVFNMLKKYVRAEQKDRQHTLKHFEHVRMVDPKKAAQIRSQVMTHLRVIYERMNQSLSLLYNVPAVAEEIQDEVDELLQKEQNYSDDVLANMISEPRISYGNDALMPSLTETKTTVELLPVNGEFSLDDLQPWHSFGADSVPANTENEGSGLTNIKTEEISEVKMDAEFRHDSGYEVHHQKLVFFAEDVGSNKGAIIGLMVGGVVIATVIVITLVMLKKKQYTSIHHGVVEVDAAVTPEERHLSKMQQNGYENPTYKFFEQMQN

SEQ ID NO: 135 - protein, 714 aa, Artificial Sequence
  AB-40 biomarker (UniProt: P05067-6)
MLPGLALLLLAAWTARALEVPTDGNAGLLAEPQIAMFCGRLNMHMNVQNGKWDSDPSGTKTCIDTKEGILQYCQEVYPELQITNVVEANQPVTIQNWCKRGRKQCKTHPHFVIPYRCLVGEFVSDALLVPDKCKFLHQERMDVCETHLHWHTVAKETCSEKSTNLHDYGMLLPCGIDKFRGVEFVCCPLAEESDNVDSADAEEDDSDVWWGGADTDYADGSEDKVVEVAEEEEVAEVEEEEADDDEDDEDGDEVEEEAEEPYEEATERTTSIATTTTTTTESVEEVVRVSQSLLKTTQEPLARDPVKLPTTAASTPDAVDKYLETPGDENEHAHFQKAKERLEAKHRERMSQVMREWEEAERQAKNLPKADKKAVIQHFQEKVESLEQEAANERQQLVETHMARVEAMLNDRRRLALENYITALQAVPPRPRHVFNMLKKYVRAEQKDRQHTLKHFEHVRMVDPKKAAQIRSQVMTHLRVIYERMNQSLSLLYNVPAVAEEIQDEVDELLQKEQNYSDDVLANMISEPRISYGNDALMPSLTETKTTVELLPVNGEFSLDDLQPWHSFGADSVPANTENEVEPVDARPAADRGLTTRPGSGLTNIKTEEISEVKMDAEFRHDSGYEVHHQKLVFFAEDVGSNKGAIIGLMVGGVVIATVIVITLVMLKKKQYTSIHHGVVEVDAAVTPEERHLSKMQQNGYENPTYKFFEQMQN

SEQ ID NO: 136 - protein, 733 aa, Artificial Sequence
  AB-40 biomarker (UniProt: P05067-7)
MLPGLALLLLAAWTARALEVPTDGNAGLLAEPQIAMFCGRLNMHMNVQNGKWDSDPSGTKTCIDTKEGILQYCQEVYPELQITNVVEANQPVTIQNWCKRGRKQCKTHPHFVIPYRCLVGEFVSDALLVPDKCKFLHQERMDVCETHLHWHTVAKETCSEKSTNLHDYGMLLPCGIDKFRGVEFVCCPLAEESDNVDSADAEEDDSDVWWGGADTDYADGSEDKVVEVAEEEEVAEVEEEEADDDEDDEDGDEVEEEAEEPYEEATERTTSIATTTTTTTESVEEVVREVCSEQAETGPCRAMISRWYFDVTEGKCAPFFYGGCGGNRNNFDTEEYCMAVCGSAIPTTAASTPDAVDKYLETPGDENEHAHFQKAKERLEAKHRERMSQVMREWEEAERQAKNLPKADKKAVIQHFQEKVESLEQEAANERQQLVETHMARVEAMLNDRRRLALENYITALQAVPPRPRHVFNMLKKYVRAEQKDRQHTLKHFEHVRMVDPKKAAQIRSQVMTHLRVIYERMNQSLSLLYNVPAVAEEIQDEVDELLQKEQNYSDDVLANMISEPRISYGNDALMPSLTETKTTVELLPVNGEFSLDDLQPWHSFGADSVPANTENEGSGLTNIKTEEISEVKMDAEFRHDSGYEVHHQKLVFFAEDVGSNKGAIIGLMVGGVVIATVIVITLVMLKKKQYTSIHHGVVEVDAAVTPEERHLSKMQQNGYENPTYKFFEQMQN

SEQ ID NO: 137 - protein, 751 aa, Artificial Sequence
  AB-40 biomarker (UniProt: P05067-8)
MLPGLALLLLAAWTARALEVPTDGNAGLLAEPQIAMFCGRLNMHMNVQNGKWDSDPSGTKTCIDTKEGILQYCQEVYPELQITNVVEANQPVTIQNWCKRGRKQCKTHPHFVIPYRCLVGEFVSDALLVPDKCKFLHQERMDVCETHLHWHTVAKETCSEKSTNLHDYGMLLPCGIDKFRGVEFVCCPLAEESDNVDSADAEEDDSDVWWGGADTDYADGSEDKVVEVAEEEEVAEVEEEEADDDEDDEDGDEVEEEAEEPYEEATERTTSIATTTTTTTESVEEVVREVCSEQAETGPCRAMISRWYFDVTEGKCAPFFYGGCGGNRNNFDTEEYCMAVCGSAIPTTAASTPDAVDKYLETPGDENEHAHFQKAKERLEAKHRERMSQVMREWEEAERQAKNLPKADKKAVIQHFQEKVESLEQEAANERQQLVETHMARVEAMLNDRRRLALENYITALQAVPPRPRHVFNMLKKYVRAEQKDRQHTLKHFEHVRMVDPKKAAQIRSQVMTHLRVIYERMNQSLSLLYNVPAVAEEIQDEVDELLQKEQNYSDDVLANMISEPRISYGNDALMPSLTETKTTVELLPVNGEFSLDDLQPWHSFGADSVPANTENEVEPVDARPAADRGLTTRPGSGLTNIKTEEISEVKMDAEFRHDSGYEVHHQKLVFFAEDVGSNKGAIIGLMVGGVVIATVIVITLVMLKKKQYTSIHHGVVEVDAAVTPEERHLSKMQQNGYENPTYKFFEQMQN

SEQ ID NO: 138 - protein, 752 aa, Artificial Sequence
  AB-40 biomarker (UniProt: P05067-9)
MLPGLALLLLAAWTARALEVPTDGNAGLLAEPQIAMFCGRLNMHMNVQNGKWDSDPSGTKTCIDTKEGILQYCQEVYPELQITNVVEANQPVTIQNWCKRGRKQCKTHPHFVIPYRCLVGEFVSDALLVPDKCKFLHQERMDVCETHLHWHTVAKETCSEKSTNLHDYGMLLPCGIDKFRGVEFVCCPLAEESDNVDSADAEEDDSDVWWGGADTDYADGSEDKVVEVAEEEEVAEVEEEEADDDEDDEDGDEVEEEAEEPYEEATERTTSIATTTTTTTESVEEVVREVCSEQAETGPCRAMISRWYFDVTEGKCAPFFYGGCGGNRNNFDTEEYCMAVCGSAMSQSLLKTTQEPLARDPVKLPTTAASTPDAVDKYLETPGDENEHAHFQKAKERLEAKHRERMSQVMREWEEAERQAKNLPKADKKAVIQHFQEKVESLEQEAANERQQLVETHMARVEAMLNDRRRLALENYITALQAVPPRPRHVFNMLKKYVRAEQKDRQHTLKHFEHVRMVDPKKAAQIRSQVMTHLRVIYERMNQSLSLLYNVPAVAEEIQDEVDELLQKEQNYSDDVLANMISEPRISYGNDALMPSLTETKTTVELLPVNGEFSLDDLQPWHSFGADSVPANTENEGSGLTNIKTEEISEVKMDAEFRHDSGYEVHHQKLVFFAEDVGSNKGAIIGLMVGGVVIATVIVITLVMLKKKQYTSIHHGVVEVDAAVTPEERHLSKMQQNGYENPTYKFFEQMQN

SEQ ID NO: 139 - protein, 639 aa, Artificial Sequence
  AB-40 biomarker (UniProt: P05067-10)
MLPGLALLLLAAWTARALEVYPELQITNVVEANQPVTIQNWCKRGRKQCKTHPHFVIPYRCLVGEFVSDALLVPDKCKFLHQERMDVCETHLHWHTVAKETCSEKSTNLHDYGMLLPCGIDKFRGVEFVCCPLAEESDNVDSADAEEDDSDVWWGGADTDYADGSEDKVVEVAEEEEVAEVEEEEADDDEDDEDGDEVEEEAEEPYEEATERTTSIATTTTTTTESVEEVVRVPTTAASTPDAVDKYLETPGDENEHAHFQKAKERLEAKHRERMSQVMREWEEAERQAKNLPKADKKAVIQHFQEKVESLEQEAANERQQLVETHMARVEAMLNDRRRLALENYITALQAVPPRPRHVFNMLKKYVRAEQKDRQHTLKHFEHVRMVDPKKAAQIRSQVMTHLRVIYERMNQSLSLLYNVPAVAEEIQDEVDELLQKEQNYSDDVLANMISEPRISYGNDALMPSLTETKTTVELLPVNGEFSLDDLQPWHSFGADSVPANTENEVEPVDARPAADRGLTTRPGSGLTNIKTEEISEVKMDAEFRHDSGYEVHHQKLVFFAEDVGSNKGAIIGLMVGGVVIATVIVITLVMLKKKQYTSIHHGVVEVDAAVTPEERHLSKMQQNGYENPTYKFFEQMQN

SEQ ID NO: 140 - protein, 746 aa, Artificial Sequence
  AB-40 biomarker (UniProt: P05067-11)
MDQLEDLLVLFINYVPTDGNAGLLAEPQIAMFCGRLNMHMNVQNGKWDSDPSGTKTCIDTKEGILQYCQEVYPELQITNVVEANQPVTIQNWCKRGRKQCKTHPHFVIPYRCLVGEFVSDALLVPDKCKFLHQERMDVCETHLHWHTVAKETCSEKSTNLHDYGMLLPCGIDKFRGVEFVCCPLAEESDNVDSADAEEDDSDVWWGGADTDYADGSEDKVVEVAEEEEVAEVEEEEADDDEDDEDGDEVEEEAEEPYEEATERTTSIATTTTTTTESVEEVVREVCSEQAETGPCRAMISRWYFDVTEGKCAPFFYGGCGGNRNNFDTEEYCMAVCGSAIPTTAASTPDAVDKYLETPGDENEHAHFQKAKERLEAKHRERMSQVMREWEEAERQAKNLPKADKKAVIQHFQEKVESLEQEAANERQQLVETHMARVEAMLNDRRRLALENYITALQAVPPRPRHVFNMLKKYVRAEQKDRQHTLKHFEHVRMVDPKKAAQIRSQVMTHLRVIYERMNQSLSLLYNVPAVAEEIQDEVDELLQKEQNYSDDVLANMISEPRISYGNDALMPSLTETKTTVELLPVNGEFSLDDLQPWHSFGADSVPANTENEVEPVDARPAADRGLTTRPGSGLTNIKTEEISEVKMDAEFRHDSGYEVHHQKLVFFAEDVGSNKGAIIGLMVGGVVIATVIVITLVMLKKKQYTSIHHGVVEVDAAVTPEERHLSKMQQNGYENPTYKFFEQMQN

SEQ ID NO: 141 - protein, 2530 aa, Artificial Sequence
  Aggrecan biomarker (UniProt: P16112-1) (entry version 197)
MTTLLWVFVTLRVITAAVTVETSDHDNSLSVSIPQPSPLRVLLGTSLTIPCYFIDPMHPVTTAPSTAPLAPRIKWSRVSKEKEVVLLVATEGRVRVNSAYQDKVSLPNYPAIPSDATLEVQSLRSNDSGVYRCEVMHGIEDSEATLEVVVKGIVFHYRAISTRYTLDFDRAQRACLQNSAIIATPEQLQAAYEDGFHQCDAGWLADQTVRYPIHTPREGCYGDKDEFPGVRTYGIRDTNETYDVYCFAEEMEGEVFYATSPEKFTFQEAANECRRLGARLATTGQLYLAWQAGMDMCSAGWLADRSVRYPISKARPNCGGNLLGVRTVYVHANQTGYPDPSSRYDAICYTGEDFVDIPENFFGVGGEEDITVQTVTWPDMELPLPRNITEGEARGSVILTVKPIFEVSPSPLEPEEPFTFAPEIGATAFAEVENETGEATRPWGFPTPGLGPATAFTSEDLVVQVTAVPGQPHLPGGVVFHYRPGPTRYSLTFEEAQQACLRTGAVIASPEQLQAAYEAGYEQCDAGWLRDQTVRYPIVSPRTPCVGDKDSSPGVRTYGVRPSTETYDVYCFVDRLEGEVFFATRLEQFTFQEALEFCESHNATLATTGQLYAAWSRGLDKCYAGWLADGSLRYPIVTPRPACGGDKPGVRTVYLYPNQTGLPDPLSRHHAFCFRGISAVPSPGEEEGGTPTSPSGVEEWIVTQVVPGVAAVPVEEETTAVPSGETTAILEFTTEPENQTEWEPAYTPVGTSPLPGILPTWPPTGAATEESTEGPSATEVPSASEEPSPSEVPFPSEEPSPSEEPFPSVRPFPSVELFPSEEPFPSKEPSPSEEPSASEEPYTPSPPVPSWTELPSSGEESGAPDVSGDFTGSGDVSGHLDFSGQLSGDRASGLPSGDLDSSGLTSTVGSGLPVESGLPSGDEERIEWPSTPTVGELPSGAEILEGSASGVGDLSGLPSGEVLETSASGVGDLSGLPSGEVLETTAPGVEDISGLPSGEVLETTAPGVEDISGLPSGEVLETTAPGVEDISGLPSGEVLETTAPGVEDISGLPSGEVLETTAPGVEDISGLPSGEVLETTAPGVEDISGLPSGEVLETAAPGVEDISGLPSGEVLETAAPGVEDISGLPSGEVLETAAPGVEDISGLPSGEVLETAAPGVEDISGLPSGEVLETAAPGVEDISGLPSGEVLETAAPGVEDISGLPSGEVLETAAPGVEDISGLPSGEVLETAAPGVEDISGLPSGEVLETAAPGVEDISGLPSGEVLETAAPGVEDISGLPSGEVLETAAPGVEDISGLPSGEVLETAAPGVEDISGLPSGEVLETAAPGVEDISGLPSGEVLETAAPGVEDISGLPSGEVLETAAPGVEDISGLPSGEVLETAAPGVEDISGLPSGEVLETTAPGVEEISGLPSGEVLETTAPGVDEISGLPSGEVLETTAPGVEEISGLPSGEVLETSTSAVGDLSGLPSGGEVLEISVSGVEDISGLPSGEVVETSASGIEDVSELPSGEGLETSASGVEDLSRLPSGEEVLEISASGFGDLSGLPSGGEGLETSASEVGTDLSGLPSGREGLETSASGAEDLSGLPSGKEDLVGSASGDLDLGKLPSGTLGSGQAPETSGLPSGFSGEYSGVDLGSGPPSGLPDFSGLPSGFPTVSLVDSTLVEVVTASTASELEGRGTIGISGAGEISGLPSSELDISGRASGLPSGTELSGQASGSPDVSGEIPGLFGVSGQPSGFPDTSGETSGVTELSGLSSGQPGISGEASGVLYGTSQPFGITDLSGETSGVPDLSGQPSGLPGFSGATSGVPDLVSGTTSGSGESSGITFVDTSLVEVAPTTFKEEEGLGSVELSGLPSGEADLSGKSGMVDVSGQFSGTVDSSGFTSQTPEFSGLPSGIAEVSGESSRAEIGSSLPSGAYYGSGTPSSFPTVSLVDRTLVESVTQAPTAQEAGEGPSGILELSGAHSGAPDMSGEHSGFLDLSGLQSGLIEPSGEPPGTPYFSGDFASTTNVSGESSVAMGTSGEASGLPEVTLITSEFVEGVTEPTISQELGQRPPVTHTPQLFESSGKVSTAGDISGATPVLPGSGVEVSSVPESSSETSAYPEAGFGASAAPEASREDSGSPDLSETTSAFHEANLERSSGLGVSGSTLTFQEGEASAAPEVSGESTTTSDVGTEAPGLPSATPTASGDRTEISGDLSGHTSQLGVVISTSIPESEWTQQTQRPAETHLEIESSSLLYSGEETHTVETATSPTDASIPASPEWKRESESTAAAPARSCAEEPCGAGTCKETEGHVICLCPPGYTGEHCNIDQEVCEEGWNKYQGHCYRHFPDRETWVDAERRCREQQSHLSSIVTPEEQEFVNNNAQDYQWIGLNDRTIEGDFRWSDGHPMQFENWRPNQPDNFFAAGEDCVVMIWHEKGEWNDVPCNYHLPFTCKKGTVACGEPPVVEHARTFGQKKDRYEINSLVRYQCTEGFVQRHMPTIRCQPSGHWEEPQITCTDPTTYKRRLQKRSSRHPRRSRPSTAH

SEQ ID NO: 142 - protein, 2492 aa, Artificial Sequence
  Aggrecan biomarker (UniProt: P16112-2)
MTTLLWVFVTLRVITAAVTVETSDHDNSLSVSIPQPSPLRVLLGTSLTIPCYFIDPMHPVTTAPSTAPLAPRIKWSRVSKEKEVVLLVATEGRVRVNSAYQDKVSLPNYPAIPSDATLEVQSLRSNDSGVYRCEVMHGIEDSEATLEVVVKGIVFHYRAISTRYTLDFDRAQRACLQNSAIIATPEQLQAAYEDGFHQCDAGWLADQTVRYPIHTPREGCYGDKDEFPGVRTYGIRDTNETYDVYCFAEEMEGEVFYATSPEKFTFQEAANECRRLGARLATTGQLYLAWQAGMDMCSAGWLADRSVRYPISKARPNCGGNLLGVRTVYVHANQTGYPDPSSRYDAICYTGEDFVDIPENFFGVGGEEDITVQTVTWPDMELPLPRNITEGEARGSVILTVKPIFEVSPSPLEPEEPFTFAPEIGATAFAEVENETGEATRPWGFPTPGLGPATAFTSEDLVVQVTAVPGQPHLPGGVVFHYRPGPTRYSLTFEEAQQACLRTGAVIASPEQLQAAYEAGYEQCDAGWLRDQTVRYPIVSPRTPCVGDKDSSPGVRTYGVRPSTETYDVYCFVDRLEGEVFFATRLEQFTFQEALEFCESHNATLATTGQLYAAWSRGLDKCYAGWLADGSLRYPIVTPRPACGGDKPGVRTVYLYPNQTGLPDPLSRHHAFCFRGISAVPSPGEEEGGTPTSPSGVEEWIVTQVVPGVAAVPVEEETTAVPSGETTAILEFTTEPENQTEWEPAYTPVGTSPLPGILPTWPPTGAATEESTEGPSATEVPSASEEPSPSEVPFPSEEPSPSEEPFPSVRPFPSVELFPSEEPFPSKEPSPSEEPSASEEPYTPSPPVPSWTELPSSGEESGAPDVSGDFTGSGDVSGHLDFSGQLSGDRASGLPSGDLDSSGLTSTVGSGLPVESGLPSGDEERIEWPSTPTVGELPSGAEILEGSASGVGDLSGLPSGEVLETSASGVGDLSGLPSGEVLETTAPGVEDISGLPSGEVLETTAPGVEDISGLPSGEVLETTAPGVEDISGLPSGEVLETTAPGVEDISGLPSGEVLETTAPGVEDISGLPSGEVLETTAPGVEDISGLPSGEVLETAAPGVEDISGLPSGEVLETAAPGVEDISGLPSGEVLETAAPGVEDISGLPSGEVLETAAPGVEDISGLPSGEVLETAAPGVEDISGLPSGEVLETAAPGVEDISGLPSGEVLETAAPGVEDISGLPSGEVLETAAPGVEDISGLPSGEVLETAAPGVEDISGLPSGEVLETAAPGVEDISGLPSGEVLETAAPGVEDISGLPSGEVLETAAPGVEDISGLPSGEVLETAAPGVEDISGLPSGEVLETAAPGVEDISGLPSGEVLETAAPGVEDISGLPSGEVLETAAPGVEDISGLPSGEVLETTAPGVEEISGLPSGEVLETTAPGVDEISGLPSGEVLETTAPGVEEISGLPSGEVLETSTSAVGDLSGLPSGGEVLEISVSGVEDISGLPSGEVVETSASGIEDVSELPSGEGLETSASGVEDLSRLPSGEEVLEISASGFGDLSGLPSGGEGLETSASEVGTDLSGLPSGREGLETSASGAEDLSGLPSGKEDLVGSASGDLDLGKLPSGTLGSGQAPETSGLPSGFSGEYSGVDLGSGPPSGLPDFSGLPSGFPTVSLVDSTLVEVVTASTASELEGRGTIGISGAGEISGLPSSELDISGRASGLPSGTELSGQASGSPDVSGEIPGLFGVSGQPSGFPDTSGETSGVTELSGLSSGQPGISGEASGVLYGTSQPFGITDLSGETSGVPDLSGQPSGLPGFSGATSGVPDLVSGTTSGSGESSGITFVDTSLVEVAPTTFKEEEGLGSVELSGLPSGEADLSGKSGMVDVSGQFSGTVDSSGFTSQTPEFSGLPSGIAEVSGESSRAEIGSSLPSGAYYGSGTPSSFPTVSLVDRTLVESVTQAPTAQEAGEGPSGILELSGAHSGAPDMSGEHSGFLDLSGLQSGLIEPSGEPPGTPYFSGDFASTTNVSGESSVAMGTSGEASGLPEVTLITSEFVEGVTEPTISQELGQRPPVTHTPQLFESSGKVSTAGDISGATPVLPGSGVEVSSVPESSSETSAYPEAGFGASAAPEASREDSGSPDLSETTSAFHEANLERSSGLGVSGSTLTFQEGEASAAPEVSGESTTTSDVGTEAPGLPSATPTASGDRTEISGDLSGHTSQLGVVISTSIPESEWTQQTQRPAETHLEIESSSLLYSGEETHTVETATSPTDASIPASPEWKRESESTAADQEVCEEGWNKYQGHCYRHFPDRETWVDAERRCREQQSHLSSIVTPEEQEFVNNNAQDYQWIGLNDRTIEGDFRWSDGHPMQFENWRPNQPDNFFAAGEDCVVMIWHEKGEWNDVPCNYHLPFTCKKGTVACGEPPVVEHARTFGQKKDRYEINSLVRYQCTEGFVQRHMPTIRCQPSGHWEEPQITCTDPTTYKRRLQKRSSRHPRRSRPSTAH

SEQ ID NO: 143 - protein, 2431 aa, Artificial Sequence
  Aggrecan biomarker (UniProt: P16112-3)
MTTLLWVFVTLRVITAAVTVETSDHDNSLSVSIPQPSPLRVLLGTSLTIPCYFIDPMHPVTTAPSTAPLAPRIKWSRVSKEKEVVLLVATEGRVRVNSAYQDKVSLPNYPAIPSDATLEVQSLRSNDSGVYRCEVMHGIEDSEATLEVVVKGIVFHYRAISTRYTLDFDRAQRACLQNSAIIATPEQLQAAYEDGFHQCDAGWLADQTVRYPIHTPREGCYGDKDEFPGVRTYGIRDTNETYDVYCFAEEMEGEVFYATSPEKFTFQEAANECRRLGARLATTGQLYLAWQAGMDMCSAGWLADRSVRYPISKARPNCGGNLLGVRTVYVHANQTGYPDPSSRYDAICYTGEDFVDIPENFFGVGGEEDITVQTVTWPDMELPLPRNITEGEARGSVILTVKPIFEVSPSPLEPEEPFTFAPEIGATAFAEVENETGEATRPWGFPTPGLGPATAFTSEDLVVQVTAVPGQPHLPGGVVFHYRPGPTRYSLTFEEAQQACLRTGAVIASPEQLQAAYEAGYEQCDAGWLRDQTVRYPIVSPRTPCVGDKDSSPGVRTYGVRPSTETYDVYCFVDRLEGEVFFATRLEQFTFQEALEFCESHNATLATTGQLYAAWSRGLDKCYAGWLADGSLRYPIVTPRPACGGDKPGVRTVYLYPNQTGLPDPLSRHHAFCFRGISAVPSPGEEEGGTPTSPSGVEEWIVTQVVPGVAAVPVEEETTAVPSGETTAILEFTTEPENQTEWEPAYTPVGTSPLPGILPTWPPTGAATEESTEGPSATEVPSASEEPSPSEVPFPSEEPSPSEEPFPSVRPFPSVELFPSEEPFPSKEPSPSEEPSASEEPYTPSPPVPSWTELPSSGEESGAPDVSGDFTGSGDVSGHLDFSGQLSGDRASGLPSGDLDSSGLTSTVGSGLPVESGLPSGDEERIEWPSTPTVGELPSGAEILEGSASGVGDLSGLPSGEVLETSASGVGDLSGLPSGEVLETTAPGVEDISGLPSGEVLETTAPGVEDISGLPSGEVLETTAPGVEDISGLPSGEVLETTAPGVEDISGLPSGEVLETTAPGVEDISGLPSGEVLETTAPGVEDISGLPSGEVLETAAPGVEDISGLPSGEVLETAAPGVEDISGLPSGEVLETAAPGVEDISGLPSGEVLETAAPGVEDISGLPSGEVLETAAPGVEDISGLPSGEVLETAAPGVEDISGLPSGEVLETAAPGVEDISGLPSGEVLETAAPGVEDISGLPSGEVLETAAPGVEDISGLPSGEVLETAAPGVEDISGLPSGEVLETAAPGVEDISGLPSGEVLETAAPGVEDISGLPSGEVLETAAPGVEDISGLPSGEVLETAAPGVEDISGLPSGEVLETAAPGVEDISGLPSGEVLETAAPGVEDISGLPSGEVLETTAPGVEEISGLPSGEVLETTAPGVDEISGLPSGEVLETTAPGVEEISGLPSGEVLETSTSAVGDLSGLPSGGEVLEISVSGVEDISGLPSGEVVETSASGIEDVSELPSGEGLETSASGVEDLSRLPSGEEVLEISASGFGDLSGLPSGGEGLETSASEVGTDLSGLPSGREGLETSASGAEDLSGLPSGKEDLVGSASGDLDLGKLPSGTLGSGQAPETSGLPSGFSGEYSGVDLGSGPPSGLPDFSGLPSGFPTVSLVDSTLVEVVTASTASELEGRGTIGISGAGEISGLPSSELDISGRASGLPSGTELSGQASGSPDVSGEIPGLFGVSGQPSGFPDTSGETSGVTELSGLSSGQPGISGEASGVLYGTSQPFGITDLSGETSGVPDLSGQPSGLPGFSGATSGVPDLVSGTTSGSGESSGITFVDTSLVEVAPTTFKEEEGLGSVELSGLPSGEADLSGKSGMVDVSGQFSGTVDSSGFTSQTPEFSGLPSGIAEVSGESSRAEIGSSLPSGAYYGSGTPSSFPTVSLVDRTLVESVTQAPTAQEAGEGPSGILELSGAHSGAPDMSGEHSGFLDLSGLQSGLIEPSGEPPGTPYFSGDFASTTNVSGESSVAMGTSGEASGLPEVTLITSEFVEGVTEPTISQELGQRPPVTHTPQLFESSGKVSTAGDISGATPVLPGSGVEVSSVPESSSETSAYPEAGFGASAAPEASREDSGSPDLSETTSAFHEANLERSSGLGVSGSTLTFQEGEASAAPEVSGESTTTSDVGTEAPGLPSATPTASGDRTEISGDLSGHTSQLGVVISTSIPESEWTQQTQRPAETHLEIESSSLLYSGEETHTVETATSPTDASIPASPEWKRESESTAADQEVCEEGWNKYQGHCYRHFPDRETWVDAERRCREQQSHLSSIVTPEEQEFVNNNAQDYQWIGLNDRTIEGDFRWSDGHPMQFENWRPNQPDNFFAAGEDCVVMIWHEKGEWNDVPCNYHLPFTCKKGTATTYKRRLQKRSSRHPRRSRPSTAH

SEQ ID NO: 144 - protein, 183 aa, Artificial Sequence
  FRTN biomarker (UniProt: P02794) (entry version 213)
MTTASTSQVRQNYHQDSEAAINRQINLELYASYVYLSMSYYFDRDDVALKNFAKYFLHQSHEEREHAEKLMKLQNQRGGRIFLQDIKKPDCDDWESGLNAMECALHLEKNVNQSLLELHKLATDKNDPHLCDFIETHYLNEQVKAIKELGDHVTNLRKMGAPESGLAEYLFDKHTLGDSDNES

SEQ ID NO: 145 - protein, 1304 aa, Artificial Sequence
  Nr-CAM biomarker (UniProt: Q92823-1) (entry version 172)
MQLKIMPKKKRLSAGRVPLILFLCQMISALEVPLDPKLLEDLVQPPTITQQSPKDYIIDPRENIVIQCEAKGKPPPSFSWTRNGTHFDIDKDPLVTMKPGTGTLIINIMSEGKAETYEGVYQCTARNERGAAVSNNIVVRPSRSPLWTKEKLEPITLQSGQSLVLPCRPPIGLPPPIIFWMDNSFQRLPQSERVSQGLNGDLYFSNVLPEDTREDYICYARFNHTQTIQQKQPISVKVISVDELNDTIAANLSDTEFYGAKSSRERPPTFLTPEGNASNKEELRGNVLSLECIAEGLPTPIIYWAKEDGMLPKNRTVYKNFEKTLQIIHVSEADSGNYQCIAKNALGAIHHTISVRVKAAPYWITAPQNLVLSPGEDGTLICRANGNPKPRISWLTNGVPIEIAPDDPSRKIDGDTIIFSNVQERSSAVYQCNASNEYGYLLANAFVNVLAEPPRILTPANTLYQVIANRPALLDCAFFGSPLPTIEWFKGAKGSALHEDIYVLHENGTLEIPVAQKDSTGTYTCVARNKLGMAKNEVHLEIKDPTWIVKQPEYAVVQRGSMVSFECKVKHDHTLSLTVLWLKDNRELPSDERFTVDKDHLVVADVSDDDSGTYTCVANTTLDSVSASAVLSVVAPTPTPAPVYDVPNPPFDLELTDQLDKSVQLSWTPGDDNNSPITKFIIEYEDAMHKPGLWHHQTEVSGTQTTAQLKLSPYVNYSFRVMAVNSIGKSLPSEASEQYLTKASEPDKNPTAVEGLGSEPDNLVITWKPLNGFESNGPGLQYKVSWRQKDGDDEWTSVVVANVSKYIVSGTPTFVPYLIKVQALNDMGFAPEPAVVMGHSGEDLPMVAPGNVRVNVVNSTLAEVHWDPVPLKSIRGHLQGYRIYYWKTQSSSKRNRRHIEKKILTFQGSKTHGMLPGLEPFSHYTLNVRVVNGKGEGPASPDRVFNTPEGVPSAPSSLKIVNPTLDSLTLEWDPPSHPNGILTEYTLKYQPINSTHELGPLVDLKIPANKTRWTLKNLNFSTRYKFYFYAQTSAGSGSQITEEAVTTVDEAGILPPDVGAGKVQAVNPRISNLTAAAAETYANISWEYEGPEHVNFYVEYGVAGSKEEWRKEIVNGSRSFFGLKGLMPGTAYKVRVGAVGDSGFVSSEDVFETGPAMASRQVDIATQGWFIGLMCAVALLILILLIVCFIRRNKGGKYPVKEKEDAHADPEIQPMKEDDGTFGEYSDAEDHKPLKKGSRTPSDRTVKKEDSDDSLVDYGEGVNGQFNEDGSFIGQYSGKKEKEPAEGNESSEAPSPVNAMNSFV

SEQ ID NO: 146 - protein, 1236 aa, Artificial Sequence
  Nr-CAM biomarker (UniProt: Q92823-2)
MQLKIMPKKKRLSAGRVPLILFLCQMISALEVPLDPKLLEDLVQPPTITQQSPKDYIIDPRENIVIQCEAKGKPPPSFSWTRNGTHFDIDKDPLVTMKPGTGTLIINIMSEGKAETYEGVYQCTARNERGAAVSNNIVVRPSRSPLWTKEKLEPITLQSGQSLVLPCRPPIGLPPPIIFWMDNSFQRLPQSERVSQGLNGDLYFSNVLPEDTREDYICYARFNHTQTIQQKQPISVKVISVDELNDTIAANLSDTEFYGAKSSRERPPTFLTPEGNASNKEELRGNVLSLECIAEGLPTPIIYWAKEDGMLPKNRTVYKNFEKTLQIIHVSEADSGNYQCIAKNALGAIHHTISVRVKAAPYWITAPQNLVLSPGEDGTLICRANGNPKPRISWLTNGVPIEIAPDDPSRKIDGDTIIFSNVQERSSAVYQCNASNEYGYLLANAFVNVLAEPPRILTPANTLYQVIANRPALLDCAFFGSPLPTIEWFKGAKGSALHEDIYVLHENGTLEIPVAQKDSTGTYTCVARNKLGMAKNEVHLEIKDPTWIVKQPEYAVVQRGSMVSFECKVKHDHTLSLTVLWLKDNRELPSDERFTVDKDHLVVADVSDDDSGTYTCVANTTLDSVSASAVLSVVAPTPTPAPVYDVPNPPFDLELTDQLDKSVQLSWTPGDDNNSPITKFIIEYEDAMHKPGLWHHQTEVSGTQTTAQLKLSPYVNYSFRVMAVNSIGKSLPSEASEQYLTKASEPDKNPTAVEGLGSEPDNLVITWKPLNGFESNGPGLQYKVSWRQKDGDDEWTSVVVANVSKYIVSGTPTFVPYLIKVQALNDMGFAPEPAVVMGHSGEDLPMVAPGNVRVNVVNSTLAEVHWDPVPLKSIRGHLQGYRIYYWKTQSSSKRNRRHIEKKILTFQGSKTHGMLPGLEPFSHYTLNVRVVNGKGEGPASPDRVFNTPEGVPSAPSSLKIVNPTLDSLTLEWDPPSHPNGILTEYTLKYQPINSTHELGPLVDLKIPANKTRWTLKNLNFSTRYKFYFYAQTSAGSGSQITEEAVTTVDEAGILPPDVGAGKVQAVNPRISNLTAAAAETYANISWEYEGPEHVNFYVEYGVAGSKEEWRKEIVNGSRSFFGLKGLMPGTAYKVRVGAVGDSGFVSSEDVFETGPAMASRQVDIATQGWFIGLMCAVALLILILLIVCFIRRNKGGKYPVKEKEDAHADPEIQPMKEDDGTFGEYRLFSFVSSASF

SEQ ID NO: 147 - protein, 1180 aa, Artificial Sequence
  Nr-CAM biomarker (UniProt: Q92823-3)
MQLKIMPKKKRLSAGRVPLILFLCQMISALEVPLDPKLLEDLVQPPTITQQSPKDYIIDPRENIVIQCEAKGKPPPSFSWTRNGTHFDIDKDPLVTMKPGTGTLIINIMSEGKAETYEGVYQCTARNERGAAVSNNIVVRPSRSPLWTKEKLEPITLQSGQSLVLPCRPPIGLPPPIIFWMDNSFQRLPQSERVSQGLNGDLYFSNVLPEDTREDYICYARFNHTQTIQQKQPISVKVISAKSSRERPPTFLTPEGNASNKEELRGNVLSLECIAEGLPTPIIYWAKEDGMLPKNRTVYKNFEKTLQIIHVSEADSGNYQCIAKNALGAIHHTISVRVKAAPYWITAPQNLVLSPGEDGTLICRANGNPKPRISWLTNGVPIEIAPDDPSRKIDGDTIIFSNVQERSSAVYQCNASNEYGYLLANAFVNVLAEPPRILTPANTLYQVIANRPALLDCAFFGSPLPTIEWFKGAKGSALHEDIYVLHENGTLEIPVAQKDSTGTYTCVARNKLGMAKNEVHLEIKDPTWIVKQPEYAVVQRGSMVSFECKVKHDHTLSLTVLWLKDNRELPSDERFTVDKDHLVVADVSDDDSGTYTCVANTTLDSVSASAVLSVVAPTPTPAPVYDVPNPPFDLELTDQLDKSVQLSWTPGDDNNSPITKFIIEYEDAMHKPGLWHHQTEVSGTQTTAQLKLSPYVNYSFRVMAVNSIGKSLPSEASEQYLTKASEPDKNPTAVEGLGSEPDNLVITWKPLNGFESNGPGLQYKVSWRQKDGDDEWTSVVVANVSKYIVSGTPTFVPYLIKVQALNDMGFAPEPAVVMGHSGEDLPMVAPGNVRVNVVNSTLAEVHWDPVPLKSIRGHLQGYRIYYWKTQSSSKRNRRHIEKKILTFQGSKTHGMLPGLEPFSHYTLNVRVVNGKGEGPASPDRVFNTPEGVPSAPSSLKIVNPTLDSLTLEWDPPSHPNGILTEYTLKYQPINSTHELGPLVDLKIPANKTRWTLKNLNFSTRYKFYFYAQTSAGSGSQITEEAVTTVDEAMASRQVDIATQGWFIGLMCAVALLILILLIVCFIRRNKGGKYPVKEKEDAHADPEIQPMKEDDGTFGEYSDAEDHKPLKKGSRTPSDRTVKKEDSDDSLVDYGEGVNGQFNEDGSFIGQYSGKKEKEPAEGNESSEAPSPVNAMNSFV

SEQ ID NO: 148 - protein, 1183 aa, Artificial Sequence
  Nr-CAM biomarker (UniProt: Q92823-4)
MQLKIMPKKKRLSAGRVPLILFLCQMISALEVPLDLVQPPTITQQSPKDYIIDPRENIVIQCEAKGKPPPSFSWTRNGTHFDIDKDPLVTMKPGTGTLIINIMSEGKAETYEGVYQCTARNERGAAVSNNIVVRPSRSPLWTKEKLEPITLQSGQSLVLPCRPPIGLPPPIIFWMDNSFQRLPQSERVSQGLNGDLYFSNVLPEDTREDYICYARFNHTQTIQQKQPISVKVISVDELNDTIAANLSDTEFYGAKSSRERPPTFLTPEGNASNKEELRGNVLSLECIAEGLPTPIIYWAKEDGMLPKNRTVYKNFEKTLQIIHVSEADSGNYQCIAKNALGAIHHTISVRVKAAPYWITAPQNLVLSPGEDGTLICRANGNPKPRISWLTNGVPIEIAPDDPSRKIDGDTIIFSNVQERSSAVYQCNASNEYGYLLANAFVNVLAEPPRILTPANTLYQVIANRPALLDCAFFGSPLPTIEWFKGAKGSALHEDIYVLHENGTLEIPVAQKDSTGTYTCVARNKLGMAKNEVHLEIKDPTWIVKQPEYAVVQRGSMVSFECKVKHDHTLSLTVLWLKDNRELPSDERFTVDKDHLVVADVSDDDSGTYTCVANTTLDSVSASAVLSVVDVPNPPFDLELTDQLDKSVQLSWTPGDDNNSPITKFIIEYEDAMHKPGLWHHQTEVSGTQTTAQLKLSPYVNYSFRVMAVNSIGKSLPSEASEQYLTKASEPDKNPTAVEGLGSEPDNLVITWKPLNGFESNGPGLQYKVSWRQKDGDDEWTSVVVANVSKYIVSGTPTFVPYLIKVQALNDMGFAPEPAVVMGHSGEDLPMVAPGNVRVNVVNSTLAEVHWDPVPLKSIRGHLQGYRIYYWKTQSSSKRNRRHIEKKILTFQGSKTHGMLPGLEPFSHYTLNVRVVNGKGEGPASPDRVFNTPEGVPSAPSSLKIVNPTLDSLTLEWDPPSHPNGILTEYTLKYQPINSTHELGPLVDLKIPANKTRWTLKNLNFSTRYKFYFYAQTSAGSGSQITEEAVTTVDEAMASRQVDIATQGWFIGLMCAVALLILILLIVCFIRRNKGGKYPVKEKEDAHADPEIQPMKEDDGTFGEYSDAEDHKPLKKGSRTPSDRTVKKEDSDDSLVDYGEGVNGQFNEDGSFIGQYSGKKEKEPAEGNESSEAPSPVNAMNSFV

SEQ ID NO: 149 - protein, 1308 aa, Artificial Sequence
  Nr-CAM biomarker (UniProt: Q92823-5)
MQLKIMPKKKRLSAGRVPLILFLCQMISALEVPLDPKLLEDLVQPPTITQQSPKDYIIDPRENIVIQCEAKGKPPPSFSWTRNGTHFDIDKDPLVTMKPGTGTLIINIMSEGKAETYEGVYQCTARNERGAAVSNNIVVRPSRSPLWTKEKLEPITLQSGQSLVLPCRPPIGLPPPIIFWMDNSFQRLPQSERVSQGLNGDLYFSNVLPEDTREDYICYARFNHTQTIQQKQPISVKVISVDELNDTIAANLSDTEFYGAKSSRERPPTFLTPEGNASNKEELRGNVLSLECIAEGLPTPIIYWAKEDGMLPKNRTVYKNFEKTLQIIHVSEADSGNYQCIAKNALGAIHHTISVRVKAAPYWITAPQNLVLSPGEDGTLICRANGNPKPRISWLTNGVPIEIAPDDPSRKIDGDTIIFSNVQERSSAVYQCNASNEYGYLLANAFVNVLAEPPRILTPANTLYQVIANRPALLDCAFFGSPLPTIEWFKGAKGSALHEDIYVLHENGTLEIPVAQKDSTGTYTCVARNKLGMAKNEVHLEIKDPTWIVKQPEYAVVQRGSMVSFECKVKHDHTLSLTVLWLKDNRELPSDERFTVDKDHLVVADVSDDDSGTYTCVANTTLDSVSASAVLSVVAPTPTPAPVYDVPNPPFDLELTDQLDKSVQLSWTPGDDNNSPITKFIIEYEDAMHKPGLWHHQTEVSGTQTTAQLKLSPYVNYSFRVMAVNSIGKSLPSEASEQYLTKASEPDKNPTAVEGLGSEPDNLVITWKPLNGFESNGPGLQYKVSWRQKDGDDEWTSVVVANVSKYIVSGTPTFVPYLIKVQALNDMGFAPEPAVVMGHSGEDLPMVAPGNVRVNVVNSTLAEVHWDPVPLKSIRGHLQGYRIYYWKTQSSSKRNRRHIEKKILTFQGSKTHGMLPGLEPFSHYTLNVRVVNGKGEGPASPDRVFNTPEGVPSAPSSLKIVNPTLDSLTLEWDPPSHPNGILTEYTLKYQPINSTHELGPLVDLKIPANKTRWTLKNLNFSTRYKFYFYAQTSAGSGSQITEEAVTTVDEAGILPPDVGAGKVQAVNPRISNLTAAAAETYANISWEYEGPEHVNFYVEYGVAGSKEEWRKEIVNGSRSFFGLKGLMPGTAYKVRVGAVGDSGFVSSEDVFETGPAMASRQVDIATQGWFIGLMCAVALLILILLIVCFIRRNKGGKYPVKEKEDAHADPEIQPMKEDDGTFGEYRSLESDAEDHKPLKKGSRTPSDRTVKKEDSDDSLVDYGEGVNGQFNEDGSFIGQYSGKKEKEPAEGNESSEAPSPVNAMNSFV

SEQ ID NO: 150 - protein, 1192 aa, Artificial Sequence
  Nr-CAM biomarker (UniProt: Q92823-6)
MQLKIMPKKKRLSAGRVPLILFLCQMISALEVPLDPKLLEDLVQPPTITQQSPKDYIIDPRENIVIQCEAKGKPPPSFSWTRNGTHFDIDKDPLVTMKPGTGTLIINIMSEGKAETYEGVYQCTARNERGAAVSNNIVVRPSRSPLWTKEKLEPITLQSGQSLVLPCRPPIGLPPPIIFWMDNSFQRLPQSERVSQGLNGDLYFSNVLPEDTREDYICYARFNHTQTIQQKQPISVKVISAKSSRERPPTFLTPEGNASNKEELRGNVLSLECIAEGLPTPIIYWAKEDGMLPKNRTVYKNFEKTLQIIHVSEADSGNYQCIAKNALGAIHHTISVRVKAAPYWITAPQNLVLSPGEDGTLICRANGNPKPRISWLTNGVPIEIAPDDPSRKIDGDTIIFSNVQERSSAVYQCNASNEYGYLLANAFVNVLAEPPRILTPANTLYQVIANRPALLDCAFFGSPLPTIEWFKGAKGSALHEDIYVLHENGTLEIPVAQKDSTGTYTCVARNKLGMAKNEVHLEIKDPTWIVKQPEYAVVQRGSMVSFECKVKHDHTLSLTVLWLKDNRELPSDERFTVDKDHLVVADVSDDDSGTYTCVANTTLDSVSASAVLSVVAPTPTPAPVYDVPNPPFDLELTDQLDKSVQLSWTPGDDNNSPITKFIIEYEDAMHKPGLWHHQTEVSGTQTTAQLKLSPYVNYSFRVMAVNSIGKSLPSEASEQYLTKASEPDKNPTAVEGLGSEPDNLVITWKPLNGFESNGPGLQYKVSWRQKDGDDEWTSVVVANVSKYIVSGTPTFVPYLIKVQALNDMGFAPEPAVVMGHSGEDLPMVAPGNVRVNVVNSTLAEVHWDPVPLKSIRGHLQGYRIYYWKTQSSSKRNRRHIEKKILTFQGSKTHGMLPGLEPFSHYTLNVRVVNGKGEGPASPDRVFNTPEGVPSAPSSLKIVNPTLDSLTLEWDPPSHPNGILTEYTLKYQPINSTHELGPLVDLKIPANKTRWTLKNLNFSTRYKFYFYAQTSAGSGSQITEEAVTTVDEAGILPPDVGAGKAMASRQVDIATQGWFIGLMCAVALLILILLIVCFIRRNKGGKYPVKEKEDAHADPEIQPMKEDDGTFGEYSDAEDHKPLKKGSRTPSDRTVKKEDSDDSLVDYGEGVNGQFNEDGSFIGQYSGKKEKEPAEGNESSEAPSPVNAMNSFV

SEQ ID NO: 151 - protein, 213 aa, Artificial Sequence
  Sclerstin biomarker (UniProt: Q9BQB4-1) (entry version 145)
MQLPLALCLVCLLVHTAFRVVEGQGWQAFKNDATEIIPELGEYPEPPPELENNKTMNRAENGGRPPHHPFETKDVSEYSCRELHFTRYVTDGPCRSAKPVTELVCSGQCGPARLLPNAIGRGKWWRPSGPDFRCIPDRYRAQRVQLLCPGGEAPRARKVRLVASCKCKRLTRFHNQSELKDFGTEAARPQKGRKPRPRARSAKANQAELENAY

SEQ ID NO: 152 - protein, 217 aa, Artificial Sequence
  Sclerstin biomarker (UniProt: Q9BQB4-2)
MQLPLALCLVCLLVHTAFRVVEGQGWQAFKNDATEIIPELGEYPEPPPELENNKTMNRAENGGWPGGRPPSRAPLSTDVSEYSCRELHFTRYVTDGPCRSAKPVTELVCSGQCGPARLLPNAIGRGKWWRPSGPDFRCIPDRYRAQRVQLLCPGGEAPRARKVRLVASCKCKRLTRFHNQSELKDFGTEAARPQKGRKPRPRARSAKANQAELENAY

SEQ ID NO: 153 - protein, 261 aa, Artificial Sequence
  PSA-f biomarker (UniProt: P07288-1) (entry version 197)
MWVPVVFLTLSVTWIGAAPLILSRIVGGWECEKHSQPWQVLVASRGRAVCGGVLVHPQWVLTAAHCIRNKSVILLGRHSLFHPEDTGQVFQVSHSFPHPLYDMSLLKNRFLRPGDDSSHDLMLLRLSEPAELTDAVKVMDLPTQEPALGTTCYASGWGSIEPEEFLTPKKLQCVDLHVISNDVCAQVHPQKVTKFMLCAGRWTGGKSTCSGDSGGPLVCNGVLQGITSWGSEPCALPERPSLYTKVVHYRKWIKDTIVANP

SEQ ID NO: 154 - protein, 238 aa, Artificial Sequence
  PSA-f biomarker (UniProt: P07288-2)
MWVPVVFLTLSVTWIGAAPLILSRIVGGWECEKHSQPWQVLVASRGRAVCGGVLVHPQWVLTAAHCIRNKSVILLGRHSLFHPEDTGQVFQVSHSFPHPLYDMSLLKNRFLRPGDDSSHDLMLLRLSEPAELTDAVKVMDLPTQEPALGTTCYASGWGSIEPEEFLTPKKLQCVDLHVISNDVCAQVHPQKVTKFMLCAGRWTGGKSTCSWVILITELTMPALPMVLHGSLVPWRGGV

SEQ ID NO: 155 - protein, 218 aa, Artificial Sequence
  PSA-f biomarker (UniProt: P07288-3)
MWVPVVFLTLSVTWIGAAPLILSRIVGGWECEKHSQPWQVLVASRGRAVCGGVLVHPQWVLTAAHCIRKPGDDSSHDLMLLRLSEPAELTDAVKVMDLPTQEPALGTTCYASGWGSIEPEEFLTPKKLQCVDLHVISNDVCAQVHPQKVTKFMLCAGRWTGGKSTCSGDSGGPLVCNGVLQGITSWGSEPCALPERPSLYTKVVHYRKWIKDTIVANP

SEQ ID NO: 156 - protein, 69 aa, Artificial Sequence
  PSA-f biomarker (UniProt: P07288-4)
MWVPVVFLTLSVTWIGAAPLILSRIVGGWECEKHSQPWQVLVASRGRAVCGGVLVHPQWVLTAAHCIRK

SEQ ID NO: 157 - protein, 227 aa, Artificial Sequence
  PSA-f biomarker (UniProt: P07288-5)
MWVPVVFLTLSVTWIGAAPLILSRIVGGWECEKHSQPWQVLVASRGRAVCGGVLVHPQWVLTAAHCIRNKSVILLGRHSLFHPEDTGQVFQVSHSFPHPLYDMSLLKNRFLRPGDDSSHDLMLLRLSEPAELTDAVKVMDLPTQEPALGTTCYASGWGSIEPEEFLTPKKLQCVDLHVISNDVCAQVHPQKVTKFMLCAGRWTGGKSTCSVSHPYSQDLEGKGEWGP

SEQ ID NO: 158 - protein, 1026 aa, Artificial Sequence
  NF-H biomarker (UniProt: P12036-1) (enty version 177)
MMSFGGADALLGAPFAPLHGGGSLHYALARKGGAGGTRSAAGSSSGFHSWTRTSVSSVSASPSRFRGAGAASSTDSLDTLSNGPEGCMVAVATSRSEKEQLQALNDRFAGYIDKVRQLEAHNRSLEGEAAALRQQQAGRSAMGELYEREVREMRGAVLRLGAARGQLRLEQEHLLEDIAHVRQRLDDEARQREEAEAAARALARFAQEAEAARVDLQKKAQALQEECGYLRRHHQEEVGELLGQIQGSGAAQAQMQAETRDALKCDVTSALREIRAQLEGHAVQSTLQSEEWFRVRLDRLSEAAKVNTDAMRSAQEEITEYRRQLQARTTELEALKSTKDSLERQRSELEDRHQADIASYQEAIQQLDAELRNTKWEMAAQLREYQDLLNVKMALDIEIAAYRKLLEGEECRIGFGPIPFSLPEGLPKIPSVSTHIKVKSEEKIKVVEKSEKETVIVEEQTEETQVTEEVTEEEEKEAKEEEGKEEEGGEEEEAEGGEEETKSPPAEEAASPEKEAKSPVKEEAKSPAEAKSPEKEEAKSPAEVKSPEKAKSPAKEEAKSPPEAKSPEKEEAKSPAEVKSPEKAKSPAKEEAKSPAEAKSPEKAKSPVKEEAKSPAEAKSPVKEEAKSPAEVKSPEKAKSPTKEEAKSPEKAKSPEKAKSPEKEEAKSPEKAKSPVKAEAKSPEKAKSPVKAEAKSPEKAKSPVKEEAKSPEKAKSPVKEEAKSPEKAKSPVKEEAKTPEKAKSPVKEEAKSPEKAKSPEKAKTLDVKSPEAKTPAKEEARSPADKFPEKAKSPVKEEVKSPEKAKSPLKEDAKAPEKEIPKKEEVKSPVKEEEKPQEVKVKEPPKKAEEEKAPATPKTEEKKDSKKEEAPKKEAPKPKVEEKKEPAVEKPKESKVEAKKEEAEDKKKVPTPEKEAPAKVEVKEDAKPKEKTEVAKKEPDDAKAKEPSKPAEKKEAAPEKKDTKEEKAKKPEEKPKTEAKAKEDDKTLSKEPSKPKAEKAEKSSSTDQKDSKPPEKATEDKAAKGK

SEQ ID NO: 159 - protein, 963 aa, Artificial Sequence
  NF-H biomarker (UniProt: P12036-2)
MMSFGGADALLGAPFAPLHGGGSLHYALARKGGAGGTRSAAGSSSGFHSWTRTSVSSVSASPSRFRGAGAASSTDSLDTLSNGPEGCMVAVATSRSEKEQLQALNDRFAGYIDKVRQLEAHNRSLEGEAAALRQQQAGRSAMGELYEREVREMRGAVLRLGAARGQLRLEQEHLLEDIAHVRQRLDDEARQREEAEAAARALARFAQEAEAARVDLQKKAQALQEECGYLRRHHQEEVGELLGQIQGSGAAQAQMQAETRDALKCDVTSALREIRAQLEGHAVQSTLQSEEWFRVRLDRLSEAAKVNTDAMRSAQEEITEYRRQLQARTTELEALKSTKDSLERQRSELEDRHQADIASYQEAIQQLDAELRNTKWEMAAQLREYQDLLNVKMALDIEIAAYRKLLEGEECRIGFGPIPFSLPEGLPKIPSVSTHIKVKSEEKIKVVEKSEKETVIVEEQTEETQVTEEVTEEEEKEAKEEEGKEEEGGEEEEAEGGEEETKSPPAEEAASPEKEAKSPVKEEAKSPAEAKSPEKEEAKSPAEVKSPEKAKSPAKEEAKSPPEAKSPEKEEAKSPAEVKSPEKAKSPAKEEAKSPAEAKSPEKAKSPVKEEAKSPAEAKSPVKEEAKSPAEVKSPEKAKSPTKEEAKSPEKAKSPEKAKSPEKEEAKSPEKAKSPVKAEAKSPEKAKSPVKAEAKSPEKAKSPVKEEAKSPEKAKSPVKEEAKSPEKAKSPVKEEAKTPEKAKSPVKEEAKAPEKEIPKKEEVKSPVKEEEKPQEVKVKEPPKKAEEEKAPATPKTEEKKDSKKEEAPKKEAPKPKVEEKKEPAVEKPKESKVEAKKEEAEDKKKVPTPEKEAPAKVEVKEDAKPKEKTEVAKKEPDDAKAKEPSKPAEKKEAAPEKKDTKEEKAKKPEEKPKTEAKAKEDDKTLSKEPSKPKAEKAEKSSSTDQKDSKPPEKATEDKAAKGK

SEQ ID NO: 160 - protein, 617 aa, Artificial Sequence
  DBH biomarker (UniProt: P09172) (entry version 194)
MPALSRWASLPGPSMREAAFMYSTAVAIFLVILVAALQGSAPRESPLPYHIPLDPEGSLELSWNVSYTQEAIHFQLLVRRLKAGVLFGMSDRGELENADLVVLWTDGDTAYFADAWSDQKGQIHLDPQQDYQLLQVQRTPEGLTLLFKRPFGTCDPKDYLIEDGTVHLVYGILEEPFRSLEAINGSGLQMGLQRVQLLKPNIPEPELPSDACTMEVQAPNIQIPSQETTYWCYIKELPKGFSRHHIIKYEPIVTKGNEALVHHMEVFQCAPEMDSVPHFSGPCDSKMKPDRLNYCRHVLAAWALGAKAFYYPEEAGLAFGGPGSSRYLRLEVHYHNPLVIEGRNDSSGIRLYYTAKLRRFNAGIMELGLVYTPVMAIPPRETAFILTGYCTDKCTQLALPPSGIHIFASQLHTHLTGRKVVTVLVRDGREWEIVNQDNHYSPHFQEIRMLKKVVSVHPGDVLITSCTYNTEDRELATVGGFGILEEMCVNYVHYYPQTQLELCKSAVDAGFLQKYFHLINRFNNEDVCTCPQASVSQQFTSVPWNSFNRDVLKALYSFAPISMHCNKSSAVRFQGEWNLQPLPKVISTLEEPTPQCPTSQGRSPAGPTVVSIGGGKG

SEQ ID NO: 161 - protein, 703 aa, Artificial Sequence
  Fib-1C biomarker (UniProt: P23142-1) (entry version 217)
MERAAPSRRVPLPLLLLGGLALLAAGVDADVLLEACCADGHRMATHQKDCSLPYATESKECRMVQEQCCHSQLEELHCATGISLANEQDRCATPHGDNASLEATFVKRCCHCCLLGRAAQAQGQSCEYSLMVGYQCGQVFQACCVKSQETGDLDVGGLQETDKIIEVEEEQEDPYLNDRCRGGGPCKQQCRDTGDEVVCSCFVGYQLLSDGVSCEDVNECITGSHSCRLGESCINTVGSFRCQRDSSCGTGYELTEDNSCKDIDECESGIHNCLPDFICQNTLGSFRCRPKLQCKSGFIQDALGNCIDINECLSISAPCPIGHTCINTEGSYTCQKNVPNCGRGYHLNEEGTRCVDVDECAPPAEPCGKGHRCVNSPGSFRCECKTGYYFDGISRMCVDVNECQRYPGRLCGHKCENTLGSYLCSCSVGFRLSVDGRSCEDINECSSSPCSQECANVYGSYQCYCRRGYQLSDVDGVTCEDIDECALPTGGHICSYRCINIPGSFQCSCPSSGYRLAPNGRNCQDIDECVTGIHNCSINETCFNIQGGFRCLAFECPENYRRSAATLQQEKTDTVRCIKSCRPNDVTCVFDPVHTISHTVISLPTFREFTRPEEIIFLRAITPPHPASQANIIFDITEGNLRDSFDIIKRYMDGMTVGVVRQVRPIVGPFHAVLKLEMNYVVGGVVSHRNVVNVHIFVSEYWF

SEQ ID NO: 162 - protein, 566 aa, Artificial Sequence
  Fib-1C biomarker (UniProt: P23142-2)
MERAAPSRRVPLPLLLLGGLALLAAGVDADVLLEACCADGHRMATHQKDCSLPYATESKECRMVQEQCCHSQLEELHCATGISLANEQDRCATPHGDNASLEATFVKRCCHCCLLGRAAQAQGQSCEYSLMVGYQCGQVFQACCVKSQETGDLDVGGLQETDKIIEVEEEQEDPYLNDRCRGGGPCKQQCRDTGDEVVCSCFVGYQLLSDGVSCEDVNECITGSHSCRLGESCINTVGSFRCQRDSSCGTGYELTEDNSCKDIDECESGIHNCLPDFICQNTLGSFRCRPKLQCKSGFIQDALGNCIDINECLSISAPCPIGHTCINTEGSYTCQKNVPNCGRGYHLNEEGTRCVDVDECAPPAEPCGKGHRCVNSPGSFRCECKTGYYFDGISRMCVDVNECQRYPGRLCGHKCENTLGSYLCSCSVGFRLSVDGRSCEDINECSSSPCSQECANVYGSYQCYCRRGYQLSDVDGVTCEDIDECALPTGGHICSYRCINIPGSFQCSCPSSGYRLAPNGRNCQDIDECVTGIHNCSINETCFNIQGGFRCLAFECPENYRRSAAT

SEQ ID NO: 163 - protein, 601 aa, Artificial Sequence
  Fib-1C biomarker (UniProt: P23142-3)
MERAAPSRRVPLPLLLLGGLALLAAGVDADVLLEACCADGHRMATHQKDCSLPYATESKECRMVQEQCCHSQLEELHCATGISLANEQDRCATPHGDNASLEATFVKRCCHCCLLGRAAQAQGQSCEYSLMVGYQCGQVFQACCVKSQETGDLDVGGLQETDKIIEVEEEQEDPYLNDRCRGGGPCKQQCRDTGDEVVCSCFVGYQLLSDGVSCEDVNECITGSHSCRLGESCINTVGSFRCQRDSSCGTGYELTEDNSCKDIDECESGIHNCLPDFICQNTLGSFRCRPKLQCKSGFIQDALGNCIDINECLSISAPCPIGHTCINTEGSYTCQKNVPNCGRGYHLNEEGTRCVDVDECAPPAEPCGKGHRCVNSPGSFRCECKTGYYFDGISRMCVDVNECQRYPGRLCGHKCENTLGSYLCSCSVGFRLSVDGRSCEDINECSSSPCSQECANVYGSYQCYCRRGYQLSDVDGVTCEDIDECALPTGGHICSYRCINIPGSFQCSCPSSGYRLAPNGRNCQDIDECVTGIHNCSINETCFNIQGGFRCLAFECPENYRRSAATQKSKKGRQNTPAGSSKEDCRVLPWKQGLEDTHLDA

SEQ ID NO: 164 - protein, 683 aa, Artificial Sequence
  Fib-1C biomarker (UniProt: P23142-4)
MERAAPSRRVPLPLLLLGGLALLAAGVDADVLLEACCADGHRMATHQKDCSLPYATESKECRMVQEQCCHSQLEELHCATGISLANEQDRCATPHGDNASLEATFVKRCCHCCLLGRAAQAQGQSCEYSLMVGYQCGQVFQACCVKSQETGDLDVGGLQETDKIIEVEEEQEDPYLNDRCRGGGPCKQQCRDTGDEVVCSCFVGYQLLSDGVSCEDVNECITGSHSCRLGESCINTVGSFRCQRDSSCGTGYELTEDNSCKDIDECESGIHNCLPDFICQNTLGSFRCRPKLQCKSGFIQDALGNCIDINECLSISAPCPIGHTCINTEGSYTCQKNVPNCGRGYHLNEEGTRCVDVDECAPPAEPCGKGHRCVNSPGSFRCECKTGYYFDGISRMCVDVNECQRYPGRLCGHKCENTLGSYLCSCSVGFRLSVDGRSCEDINECSSSPCSQECANVYGSYQCYCRRGYQLSDVDGVTCEDIDECALPTGGHICSYRCINIPGSFQCSCPSSGYRLAPNGRNCQDIDECVTGIHNCSINETCFNIQGGFRCLAFECPENYRRSAATRCERLPCHENRECSKLPLRITYYHLSFPTNIQAPAVVFRMGPSSAVPGDSMQLAITGGNEEGFFTTRKVSPHSGVVALTKPVPEPRDLLLTVKMDLSRHGTVSSFVAKLFIFVSAEL

SEQ ID NO: 165 - protein, 154 aa, Artificial Sequence
  Myoglobin biomarker (UniProt: P02144) (entry version 178)
MGLSDGEWQLVLNVWGKVEADIPGHGQEVLIRLFKGHPETLEKFDKFKHLKSEDEMKASEDLKKHGATVLTALGGILKKKGHHEAEIKPLAQSHATKHKIPVKYLEFISECIIQVLQSKHPGDFGADAQGAMNKALELFRKDMASNYKELGFQG

SEQ ID NO: 166 - protein, 431 aa, Artificial Sequence
  uPA biomarker (UniProt: P00749-1) (entry version 230)
MRALLARLLLCVLVVSDSKGSNELHQVPSNCDCLNGGTCVSNKYFSNIHWCNCPKKFGGQHCEIDKSKTCYEGNGHFYRGKASTDTMGRPCLPWNSATVLQQTYHAHRSDALQLGLGKHNYCRNPDNRRRPWCYVQVGLKPLVQECMVHDCADGKKPSSPPEELKFQCGQKTLRPRFKIIGGEFTTIENQPWFAAIYRRHRGGSVTYVCGGSLISPCWVISATHCFIDYPKKEDYIVYLGRSRLNSNTQGEMKFEVENLILHKDYSADTLAHHNDIALLKIRSKEGRCAQPSRTIQTICLPSMYNDPQFGTSCEITGFGKENSTDYLYPEQLKMTVVKLISHRECQQPHYYGSEVTTKMLCAADPQWKTDSCQGDSGGPLVCSLQGRMTLTGIVSWGRGCALKDKPGVYTRVSHFLPWIRSHTKEENGLAL

SEQ ID NO: 167 - protein, 414 aa, Artificial Sequence
  uPA biomarker (UniProt: P00749-2)
MVFHLRTRYEQANCDCLNGGTCVSNKYFSNIHWCNCPKKFGGQHCEIDKSKTCYEGNGHFYRGKASTDTMGRPCLPWNSATVLQQTYHAHRSDALQLGLGKHNYCRNPDNRRRPWCYVQVGLKPLVQECMVHDCADGKKPSSPPEELKFQCGQKTLRPRFKIIGGEFTTIENQPWFAAIYRRHRGGSVTYVCGGSLISPCWVISATHCFIDYPKKEDYIVYLGRSRLNSNTQGEMKFEVENLILHKDYSADTLAHHNDIALLKIRSKEGRCAQPSRTIQTICLPSMYNDPQFGTSCEITGFGKENSTDYLYPEQLKMTVVKLISHRECQQPHYYGSEVTTKMLCAADPQWKTDSCQGDSGGPLVCSLQGRMTLTGIVSWGRGCALKDKPGVYTRVSHFLPWIRSHTKEENGLAL

SEQ ID NO: 168 - protein, 414 aa, Artificial Sequence
  Vaspin biomarker  (UniProt: Q8IW75) (entry version 122)
MNPTLGLAIFLAVLLTVKGLLKPSFSPRNYKALSEVQGWKQRMAAKELARQNMDLGFKLLKKLAFYNPGRNIFLSPLSISTAFSMLCLGAQDSTLDEIKQGFNFRKMPEKDLHEGFHYIIHELTQKTQDLKLSIGNTLFIDQRLQPQRKFLEDAKNFYSAETILTNFQNLEMAQKQINDFISQKTHGKINNLIENIDPGTVMLLANYIFFRARWKHEFDPNVTKEEDFFLEKNSSVKVPMMFRSGIYQVGYDDKLSCTILEIPYQKNITAIFILPDEGKLKHLEKGLQVDTFSRWKTLLSRRVVDVSVPRLHMTGTFDLKKTLSYIGVSKIFEEHGDLTKIAPHRSLKVGEAVHKAELKMDERGTEGAAGTGAQTLPMETPLVVKIDKPYLLLIYSEKIPSVLFLGKIVNPIGK

SEQ ID NO: 169 - protein, 1474 aa, Artificial Sequence
  A2Macro biomarker (UniProt: P1023) (entry vesion 206)
MGKNKLLHPSLVLLLLVLLPTDASVSGKPQYMVLVPSLLHTETTEKGCVLLSYLNETVTVSASLESVRGNRSLFTDLEAENDVLHCVAFAVPKSSSNEEVMFLTVQVKGPTQEFKKRTTVMVKNEDSLVFVQTDKSIYKPGQTVKFRVVSMDENFHPLNELIPLVYIQDPKGNRIAQWQSFQLEGGLKQFSFPLSSEPFQGSYKVVVQKKSGGRTEHPFTVEEFVLPKFEVQVTVPKIITILEEEMNVSVCGLYTYGKPVPGHVTVSICRKYSDASDCHGEDSQAFCEKFSGQLNSHGCFYQQVKTKVFQLKRKEYEMKLHTEAQIQEEGTVVELTGRQSSEITRTITKLSFVKVDSHFRQGIPFFGQVRLVDGKGVPIPNKVIFIRGNEANYYSNATTDEHGLVQFSINTTNVMGTSLTVRVNYKDRSPCYGYQWVSEEHEEAHHTAYLVFSPSKSFVHLEPMSHELPCGHTQTVQAHYILNGGTLLGLKKLSFYYLIMAKGGIVRTGTHGLLVKQEDMKGHFSISIPVKSDIAPVARLLIYAVLPTGDVIGDSAKYDVENCLANKVDLSFSPSQSLPASHAHLRVTAAPQSVCALRAVDQSVLLMKPDAELSASSVYNLLPEKDLTGFPGPLNDQDNEDCINRHNVYINGITYTPVSSTNEKDMYSFLEDMGLKAFTNSKIRKPKMCPQLQQYEMHGPEGLRVGFYESDVMGRGHARLVHVEEPHTETVRKYFPETWIWDLVVVNSAGVAEVGVTVPDTITEWKAGAFCLSEDAGLGISSTASLRAFQPFFVELTMPYSVIRGEAFTLKATVLNYLPKCIRVSVQLEASPAFLAVPVEKEQAPHCICANGRQTVSWAVTPKSLGNVNFTVSAEALESQELCGTEVPSVPEHGRKDTVIKPLLVEPEGLEKETTFNSLLCPSGGEVSEELSLKLPPNVVEESARASVSVLGDILGSAMQNTQNLLQMPYGCGEQNMVLFAPNIYVLDYLNETQQLTPEIKSKAIGYLNTGYQRQLNYKHYDGSYSTFGERYGRNQGNTWLTAFVLKTFAQARAYIFIDEAHITQALIWLSQRQKDNGCFRSSGSLLNNAIKGGVEDEVTLSAYITIALLEIPLTVTHPVVRNALFCLESAWKTAQEGDHGSHVYTKALLAYAFALAGNQDKRKEVLKSLNEEAVKKDNSVHWERPQKPKAPVGHFYEPQAPSAEVEMTSYVLLAYLTAQPAPTSEDLTSATNIVKWITKQQNAQGGFSSTQDTVVALHALSKYGAATFTRTGKAAQVTIQSSGTFSSKFQVDNNNRLLLQQVSLPELPGEYSMKVTGEGCVYLQTSLKYNILPEKEEFPFALGVQTLPQTCDEPKAHTSFQISLSVSYTGSRSASNMAIVDVKMVSGFIPLKPTVKMLERSNHVSRTEVSSNHVLIYLDKVSNQTLSLFFTVLQDVPVRDLKPAIVKVYDYYETDEFAIAEYNAPCSKDLGNA

SEQ ID NO: 170 - protein, 220 aa, Artificial Sequence
  TIMP-2 biomarker (UniProt: P16035) (entry version 187)
MGAAARTLRLALGLLLLATLLRPADACSCSPVHPQQAFCNADVVIRAKAVSEKEVDSGNDIYGNPIKRIQYEIKQIKMFKGPEKDIEFIYTAPSSAVCGVSLDVGGKKEYLIAGKAEGDGKMHITLCDFIVPWDTLSTTQKKSLNHRYQMGCECKITRCPMIPCYISSPDECLWMDWVTEKNINGHQAKFFACIKRSDGSCAWYRGAAPPKQEFLDIEDP

SEQ ID NO: 171 - protein, 138 aa, Artificial Sequence
  TSH biomarker (UniProt: P01222-1) (entry version 161)
MTALFLMSMLFGLTCGQAMSFCIPTEYTMHIERRECAYCLTINTTICAGYCMTRDINGKLFLPKYALSQDVCTYRDFIYRTVEIPGCPLHVAPYFSYPVALSCKCGKCNTDYSDCIHEAIKTNYCTKPQKSYLVGFSV

SEQ ID NO: 172 - protein, 93 aa, Artificial Sequence
  TSH biomarker (UniProt: P01222-2)
MLSFLFFPQDINGKLFLPKYALSQDVCTYRDFIYRTVEIPGCPLHVAPYFSYPVALSCKCGKCNTDYSDCIHEAIKTNYCTKPQKSYLVGFSV

SEQ ID NO: 173 - protein, 202 aa, Artificial Sequence
  Tetranectin biomarker (UniProt: P05452) (entry version 177)
MELWGAYLLLCLFSLLTQVTTEPPTQKPKKIVNAKKDVVNTKMFEELKSRLDTLAQEVALLKEQQALQTVCLKGTKVHMKCFLAFTQTKTFHEASEDCISRGGTLGTPQTGSENDALYEYLRQSVGNEAEIWLGLNDMAAEGTWVDMTGARIAYKNWETEITAQPDGGKTENCAVLSGAANGKWFDKRCRDQLPYICQFGIV

SEQ ID NO: 174 - protein, 120 aa, Artificial Sequence
  MPIF-1 biomarker (UniProt: P55773-1) (entry version 162)
MKVSVAALSCLMLVTALGSQARVTKDAETEFMMSKLPLENPVLLDRFHATSADCCISYTPRSIPCSLLESYFETNSECSKPGVIFLTKKGRRFCANPSDKQVQVCVRMLKLDTRIKTRKN

SEQ ID NO: 175 - protein, 137 aa, Artificial Sequence
  MPIF-1 biomarker (UniProt: P55773-2)
MKVSVAALSCLMLVTALGSQARVTKDAETEFMMSKLPLENPVLLDMLWRRKIGPQMTLSHAAGFHATSADCCISYTPRSIPCSLLESYFETNSECSKPGVIFLTKKGRRFCANPSDKQVQVCVRMLKLDTRIKTRKN

SEQ ID NO: 176 - protein, 95 aa, Artificial Sequence
  PPP biomarker (UniProt: P10298-1) (entry version 175)
MAAARLCLSLLLLSTCVALLLQPLLGAQGAPLEPVYPGDNATPEQMAQYAADLRRYINMLTRPRYGKRHKEDTLAFSEWGSPHAAVPRELSPLDL

SEQ ID NO: 177 - protein, 178 aa, Artificial Sequence
  PPP biomarker (UniProt: P10298-2)
MAAARLCLSLLLLSTCVALLLQPLLGAQGAPLEPVYPGDNATPEQMAQYAADLRRYINMLTRPRCVPQLGREIPAPGTLGPLHIPGHTLSPAPAPAPSRPALGKTGHLCSTGLDQCALGKMVPTGRYETGGLAPGHSACPCCLFPPRYGKRHKEDTLAFSEWGSPHAAVPRELSPLDL

SEQ ID NO: 178 - protein, 177 aa, Artificial Sequence
  IL-7 biomarker (UniProt: P13232-1) (entry version 170)
MFHVSFRYIFGLPPLILVLLPVASSDCDIEGKDGKQYESVLMVSIDQLLDSMKEIGSNCLNNEFNFFKRHICDANKEGMFLFRAARKLRQFLKMNSTGDFDLHLLKVSEGTTILLNCTGQVKGRKPAALGEAQPTKSLEENKSLKEQKKLNDLCFLKRLLQEIKTCWNKILMGTKEH

SEQ ID NO: 179 - protein, 133 aa, Artificial Sequence
  IL-7 biomarker (UniProt: P13232-2)
MFHVSFRYIFGLPPLILVLLPVASSDCDIEGKDGKQYESVLMVSIDQLLDSMKEIGSNCLNNEFNFFKRHICDANKVKGRKPAALGEAQPTKSLEENKSLKEQKKLNDLCFLKRLLQEIKTCWNKILMGTKEH

SEQ ID NO: 180 - protein, 64 aa, Artificial Sequence
  IL-7 biomarker (UniProt: P13232-3)
MKEIGSNCLNNEFNFFKRHICDANKEENKSLKEQKKLNDLCFLKRLLQEIKTCWNKILMGTKEH

SEQ ID NO: 181 - protein, 89 aa, Artificial Sequence
  PARC biomarker (UniProt: P55774) (entry version 152)
MKGLAAALLVLVCTMALCSCAQVGTNKELCCLVYTSWQIPQKFIVDYSETSPQCPKPGVILLTKRGRQICADPNKKWVQKYISDLKLNA

SEQ ID NO: 182 - protein, 1255 aa, Artificial Sequence
  CA-15-3 biomarker (UniProt: P15941-1) (entry version 204)
MTPGTQSPFFLLLLLTVLTVVTGSGHASSTPGGEKETSATQRSSVPSSTEKNAVSMTSSVLSSHSPGSGSSTTQGQDVTLAPATEPASGSAATWGQDVTSVPVTRPALGSTTPPAHDVTSAPDNKPAPGSTAPPAHGVTSAPDTRPAPGSTAPPAHGVTSAPDTRPAPGSTAPPAHGVTSAPDTRPAPGSTAPPAHGVTSAPDTRPAPGSTAPPAHGVTSAPDTRPAPGSTAPPAHGVTSAPDTRPAPGSTAPPAHGVTSAPDTRPAPGSTAPPAHGVTSAPDTRPAPGSTAPPAHGVTSAPDTRPAPGSTAPPAHGVTSAPDTRPAPGSTAPPAHGVTSAPDTRPAPGSTAPPAHGVTSAPDTRPAPGSTAPPAHGVTSAPDTRPAPGSTAPPAHGVTSAPDTRPAPGSTAPPAHGVTSAPDTRPAPGSTAPPAHGVTSAPDTRPAPGSTAPPAHGVTSAPDTRPAPGSTAPPAHGVTSAPDTRPAPGSTAPPAHGVTSAPDTRPAPGSTAPPAHGVTSAPDTRPAPGSTAPPAHGVTSAPDTRPAPGSTAPPAHGVTSAPDTRPAPGSTAPPAHGVTSAPDTRPAPGSTAPPAHGVTSAPDTRPAPGSTAPPAHGVTSAPDTRPAPGSTAPPAHGVTSAPDTRPAPGSTAPPAHGVTSAPDTRPAPGSTAPPAHGVTSAPDTRPAPGSTAPPAHGVTSAPDTRPAPGSTAPPAHGVTSAPDTRPAPGSTAPPAHGVTSAPDTRPAPGSTAPPAHGVTSAPDTRPAPGSTAPPAHGVTSAPDTRPAPGSTAPPAHGVTSAPDTRPAPGSTAPPAHGVTSAPDTRPAPGSTAPPAHGVTSAPDTRPAPGSTAPPAHGVTSAPDTRPAPGSTAPPAHGVTSAPDTRPAPGSTAPPAHGVTSAPDTRPAPGSTAPPAHGVTSAPDTRPAPGSTAPPAHGVTSAPDNRPALGSTAPPVHNVTSASGSASGSASTLVHNGTSARATTTPASKSTPFSIPSHHSDTPTTLASHSTKTDASSTHHSSVPPLTSSNHSTSPQLSTGVSFFFLSFHISNLQFNSSLEDPSTDYYQELQRDISEMFLQIYKQGGFLGLSNIKFRPGSVVVQLTLAFREGTINVHDVETQFNQYKTEAASRYNLTISDVSVSDVPFPFSAQSGAGVPGWGIALLVLVCVLVALAIVYLIALAVCQCRRKNYGQLDIFPARDTYHPMSEYPTYHTHGRYVPPSSTDRSPYEKVSAGNGGSSLSYTNPAVAATSANL

SEQ ID NO: 183 - protein, 1264 aa, Artificial Sequence
  CA-15-3 biomarker (UniProt: P15941-2)
MTPGTQSPFFLLLLLTVLTATTAPKPATVVTGSGHASSTPGGEKETSATQRSSVPSSTEKNAVSMTSSVLSSHSPGSGSSTTQGQDVTLAPATEPASGSAATWGQDVTSVPVTRPALGSTTPPAHDVTSAPDNKPAPGSTAPPAHGVTSAPDTRPAPGSTAPPAHGVTSAPDTRPAPGSTAPPAHGVTSAPDTRPAPGSTAPPAHGVTSAPDTRPAPGSTAPPAHGVTSAPDTRPAPGSTAPPAHGVTSAPDTRPAPGSTAPPAHGVTSAPDTRPAPGSTAPPAHGVTSAPDTRPAPGSTAPPAHGVTSAPDTRPAPGSTAPPAHGVTSAPDTRPAPGSTAPPAHGVTSAPDTRPAPGSTAPPAHGVTSAPDTRPAPGSTAPPAHGVTSAPDTRPAPGSTAPPAHGVTSAPDTRPAPGSTAPPAHGVTSAPDTRPAPGSTAPPAHGVTSAPDTRPAPGSTAPPAHGVTSAPDTRPAPGSTAPPAHGVTSAPDTRPAPGSTAPPAHGVTSAPDTRPAPGSTAPPAHGVTSAPDTRPAPGSTAPPAHGVTSAPDTRPAPGSTAPPAHGVTSAPDTRPAPGSTAPPAHGVTSAPDTRPAPGSTAPPAHGVTSAPDTRPAPGSTAPPAHGVTSAPDTRPAPGSTAPPAHGVTSAPDTRPAPGSTAPPAHGVTSAPDTRPAPGSTAPPAHGVTSAPDTRPAPGSTAPPAHGVTSAPDTRPAPGSTAPPAHGVTSAPDTRPAPGSTAPPAHGVTSAPDTRPAPGSTAPPAHGVTSAPDTRPAPGSTAPPAHGVTSAPDTRPAPGSTAPPAHGVTSAPDTRPAPGSTAPPAHGVTSAPDTRPAPGSTAPPAHGVTSAPDTRPAPGSTAPPAHGVTSAPDTRPAPGSTAPPAHGVTSAPDTRPAPGSTAPPAHGVTSAPDTRPAPGSTAPPAHGVTSAPDTRPAPGSTAPPAHGVTSAPDNRPALGSTAPPVHNVTSASGSASGSASTLVHNGTSARATTTPASKSTPFSIPSHHSDTPTTLASHSTKTDASSTHHSSVPPLTSSNHSTSPQLSTGVSFFFLSFHISNLQFNSSLEDPSTDYYQELQRDISEMFLQIYKQGGFLGLSNIKFRPGSVVVQLTLAFREGTINVHDVETQFNQYKTEAASRYNLTISDVSVSDVPFPFSAQSGAGVPGWGIALLVLVCVLVALAIVYLIALAVCQCRRKNYGQLDIFPARDTYHPMSEYPTYHTHGRYVPPSSTDRSPYEKVSAGNGGSSLSYTNPAVAATSANL

SEQ ID NO: 184 - protein, 1252 aa, Artificial Sequence
  CA-15-3 biomarker (UniProt: P15941-3)
MTPGTQSPFFLLLLLTVLTGSGHASSTPGGEKETSATQRSSVPSSTEKNAVSMTSSVLSSHSPGSGSSTTQGQDVTLAPATEPASGSAATWGQDVTSVPVTRPALGSTTPPAHDVTSAPDNKPAPGSTAPPAHGVTSAPDTRPAPGSTAPPAHGVTSAPDTRPAPGSTAPPAHGVTSAPDTRPAPGSTAPPAHGVTSAPDTRPAPGSTAPPAHGVTSAPDTRPAPGSTAPPAHGVTSAPDTRPAPGSTAPPAHGVTSAPDTRPAPGSTAPPAHGVTSAPDTRPAPGSTAPPAHGVTSAPDTRPAPGSTAPPAHGVTSAPDTRPAPGSTAPPAHGVTSAPDTRPAPGSTAPPAHGVTSAPDTRPAPGSTAPPAHGVTSAPDTRPAPGSTAPPAHGVTSAPDTRPAPGSTAPPAHGVTSAPDTRPAPGSTAPPAHGVTSAPDTRPAPGSTAPPAHGVTSAPDTRPAPGSTAPPAHGVTSAPDTRPAPGSTAPPAHGVTSAPDTRPAPGSTAPPAHGVTSAPDTRPAPGSTAPPAHGVTSAPDTRPAPGSTAPPAHGVTSAPDTRPAPGSTAPPAHGVTSAPDTRPAPGSTAPPAHGVTSAPDTRPAPGSTAPPAHGVTSAPDTRPAPGSTAPPAHGVTSAPDTRPAPGSTAPPAHGVTSAPDTRPAPGSTAPPAHGVTSAPDTRPAPGSTAPPAHGVTSAPDTRPAPGSTAPPAHGVTSAPDTRPAPGSTAPPAHGVTSAPDTRPAPGSTAPPAHGVTSAPDTRPAPGSTAPPAHGVTSAPDTRPAPGSTAPPAHGVTSAPDTRPAPGSTAPPAHGVTSAPDTRPAPGSTAPPAHGVTSAPDTRPAPGSTAPPAHGVTSAPDTRPAPGSTAPPAHGVTSAPDTRPAPGSTAPPAHGVTSAPDTRPAPGSTAPPAHGVTSAPDTRPAPGSTAPPAHGVTSAPDNRPALGSTAPPVHNVTSASGSASGSASTLVHNGTSARATTTPASKSTPFSIPSHHSDTPTTLASHSTKTDASSTHHSSVPPLTSSNHSTSPQLSTGVSFFFLSFHISNLQFNSSLEDPSTDYYQELQRDISEMFLQIYKQGGFLGLSNIKFRPGSVVVQLTLAFREGTINVHDVETQFNQYKTEAASRYNLTISDVSVSDVPFPFSAQSGAGVPGWGIALLVLVCVLVALAIVYLIALAVCQCRRKNYGQLDIFPARDTYHPMSEYPTYHTHGRYVPPSSTDRSPYEKVSAGNGGSSLSYTNPAVAATSANL

SEQ ID NO: 185 - protein, 1243 aa, Artificial Sequence
  CA-15-3 biomarker (UniProt: P15941-4)
MTPGTQSPFFLLLLLTVLTGGEKETSATQRSSVPSSTEKNAVSMTSSVLSSHSPGSGSSTTQGQDVTLAPATEPASGSAATWGQDVTSVPVTRPALGSTTPPAHDVTSAPDNKPAPGSTAPPAHGVTSAPDTRPAPGSTAPPAHGVTSAPDTRPAPGSTAPPAHGVTSAPDTRPAPGSTAPPAHGVTSAPDTRPAPGSTAPPAHGVTSAPDTRPAPGSTAPPAHGVTSAPDTRPAPGSTAPPAHGVTSAPDTRPAPGSTAPPAHGVTSAPDTRPAPGSTAPPAHGVTSAPDTRPAPGSTAPPAHGVTSAPDTRPAPGSTAPPAHGVTSAPDTRPAPGSTAPPAHGVTSAPDTRPAPGSTAPPAHGVTSAPDTRPAPGSTAPPAHGVTSAPDTRPAPGSTAPPAHGVTSAPDTRPAPGSTAPPAHGVTSAPDTRPAPGSTAPPAHGVTSAPDTRPAPGSTAPPAHGVTSAPDTRPAPGSTAPPAHGVTSAPDTRPAPGSTAPPAHGVTSAPDTRPAPGSTAPPAHGVTSAPDTRPAPGSTAPPAHGVTSAPDTRPAPGSTAPPAHGVTSAPDTRPAPGSTAPPAHGVTSAPDTRPAPGSTAPPAHGVTSAPDTRPAPGSTAPPAHGVTSAPDTRPAPGSTAPPAHGVTSAPDTRPAPGSTAPPAHGVTSAPDTRPAPGSTAPPAHGVTSAPDTRPAPGSTAPPAHGVTSAPDTRPAPGSTAPPAHGVTSAPDTRPAPGSTAPPAHGVTSAPDTRPAPGSTAPPAHGVTSAPDTRPAPGSTAPPAHGVTSAPDTRPAPGSTAPPAHGVTSAPDTRPAPGSTAPPAHGVTSAPDTRPAPGSTAPPAHGVTSAPDTRPAPGSTAPPAHGVTSAPDTRPAPGSTAPPAHGVTSAPDTRPAPGSTAPPAHGVTSAPDTRPAPGSTAPPAHGVTSAPDNRPALGSTAPPVHNVTSASGSASGSASTLVHNGTSARATTTPASKSTPFSIPSHHSDTPTTLASHSTKTDASSTHHSSVPPLTSSNHSTSPQLSTGVSFFFLSFHISNLQFNSSLEDPSTDYYQELQRDISEMFLQIYKQGGFLGLSNIKFRPGSVVVQLTLAFREGTINVHDVETQFNQYKTEAASRYNLTISDVSVSDVPFPFSAQSGAGVPGWGIALLVLVCVLVALAIVYLIALAVCQCRRKNYGQLDIFPARDTYHPMSEYPTYHTHGRYVPPSSTDRSPYEKVSAGNGGSSLSYTNPAVAATSANL

SEQ ID NO: 186 - protein, 1087 aa, Artificial Sequence
  CA-15-3 biomarker (UniProt: P15941-5)
MTPGTQSPFFLLLLLTVLTVVTGSGHASSTPGGEKETSATQRSSVPSSTEKNAVSMTSSVLSSHSPGSGSSTTQGQDVTLAPATEPASGSAATWGQDVTSVPVTRPALGSTTPPAHDVTSAPDNKPAPGSTAPPAHGVTSAPDTRPAPGSTAPPAHGVTSAPDTRPAPGSTAPPAHGVTSAPDTRPAPGSTAPPAHGVTSAPDTRPAPGSTAPPAHGVTSAPDTRPAPGSTAPPAHGVTSAPDTRPAPGSTAPPAHGVTSAPDTRPAPGSTAPPAHGVTSAPDTRPAPGSTAPPAHGVTSAPDTRPAPGSTAPPAHGVTSAPDTRPAPGSTAPPAHGVTSAPDTRPAPGSTAPPAHGVTSAPDTRPAPGSTAPPAHGVTSAPDTRPAPGSTAPPAHGVTSAPDTRPAPGSTAPPAHGVTSAPDTRPAPGSTAPPAHGVTSAPDTRPAPGSTAPPAHGVTSAPDTRPAPGSTAPPAHGVTSAPDTRPAPGSTAPPAHGVTSAPDTRPAPGSTAPPAHGVTSAPDTRPAPGSTAPPAHGVTSAPDTRPAPGSTAPPAHGVTSAPDTRPAPGSTAPPAHGVTSAPDTRPAPGSTAPPAHGVTSAPDTRPAPGSTAPPAHGVTSAPDTRPAPGSTAPPAHGVTSAPDTRPAPGSTAPPAHGVTSAPDTRPAPGSTAPPAHGVTSAPDTRPAPGSTAPPAHGVTSAPDTRPAPGSTAPPAHGVTSAPDTRPAPGSTAPPAHGVTSAPDTRPAPGSTAPPAHGVTSAPDTRPAPGSTAPPAHGVTSAPDTRPAPGSTAPPAHGVTSAPDTRPAPGSTAPPAHGVTSAPDTRPAPGSTAPPAHGVTSAPDTRPAPGSTAPPAHGVTSAPDTRPAPGSTAPPAHGVTSAPDTRPAPGSTAPPAHGVTSAPDTRPAPGSTAPPAHGVTSAPDTRPAPGSTAPPAHGVTSAPDNRPALGSTAPPVHNVTSASGSASGSASTLVHNGTSARATTTPASKSTPFSIPSHHSDTPTTLASHSTKTDASSTHHSSVPPLTSSNHSTSPQLSTGVSFFFLSFHISNLQFNSSLEDPSTDYYQELQRDISEMVSIGLSFPMLP

SEQ ID NO: 187 - protein, 230 aa, Artificial Sequence
  CA-15-3 biomarker (UniProt: P15941-6)
MTPGTQSPFFLLLLLTVLTVVTGSGHASSTPGGEKETSATQRSSVPSSTEKNAIPAPTTTKSCRETFLKWPGSVVVQLTLAFREGTINVHDVETQFNQYKTEAASRYNLTISDVSVSDVPFPFSAQSGAGVPGWGIALLVLVCVLVALAIVYLIALAVCQCRRKNYGQLDIFPARDTYHPMSEYPTYHTHGRYVPPSSTDRSPYEKVSAGNGGSSLSYTNPAVAATSANL

SEQ ID NO: 188 - protein, 255 aa, Artificial Sequence
  CA-15-3 biomarker (UniProt: P15941-7)
MTPGTQSPFFLLLLLTVLTVVTGSGHASSTPGGEKETSATQRSSVPSSTEKNAFNSSLEDPSTDYYQELQRDISEMFLQIYKQGGFLGLSNIKFRPGSVVVQLTLAFREGTINVHDVETQFNQYKTEAASRYNLTISDVSVSDVPFPFSAQSGAGVPGWGIALLVLVCVLVALAIVYLIALAVCQCRRKNYGQLDIFPARDTYHPMSEYPTYHTHGRYVPPSSTDRSPYEKVSAGNGGSSLSYTNPAVAATSANL

SEQ ID NO: 189 - protein, 273 aa, Artificial Sequence
  CA-15-3 biomarker (UniProt: P15941-8)
MTPGTQSPFFLLLLLTVLTVVTGSGHASSTPGGEKETSATQRSSVPSSTEKNALSTGVSFFFLSFHISNLQFNSSLEDPSTDYYQELQRDISEMFLQIYKQGGFLGLSNIKFRPGSVVVQLTLAFREGTINVHDVETQFNQYKTEAASRYNLTISDVSVSDVPFPFSAQSGAGVPGWGIALLVLVCVLVALAIVYLIALAVCQCRRKNYGQLDIFPARDTYHPMSEYPTYHTHGRYVPPSSTDRSPYEKVSAGNGGSSLSYTNPAVAATSANL

SEQ ID NO: 190 - protein, 168 aa, Artificial Sequence
  CA-15-3 biomarker (UniProt: P15941-9)
MTPGTQSPFFLLLLLTVLTVVTGSGHASSTPGGEKETSATQRSSVPSSTEKNALSTGVSFFFLSFHISNLQFNSSLEDPSTDYYQELQRDISEMAVCQCRRKNYGQLDIFPARDTYHPMSEYPTYHTHGRYVPPSSTDRSPYEKVSAGNGGSSLSYTNPAVAATSANL

SEQ ID NO: 191 - protein, 203 aa, Artificial Sequence
  CA-15-3 biomarker (UniProt: P15941-10)
MTPGTQSPFFLLLLLTVLTVVTGSGHASSTPGGEKETSATQRSSVPSSTEKNAIPAPTTTKSCRETFLKCFCRFINKGVFWASPILSSVSDVPFPFSAQSGAGVPGWGIALLVLVCVLVALAIVYLIALAVCQCRRKNYGQLDIFPARDTYHPMSEYPTYHTHGRYVPPSSTDRSPYEKVSAGNGGSSLSYTNPAVAATSANL

SEQ ID NO: 192 - protein, 264 aa, Artificial Sequence
  CA-15-3 biomarker (UniProt: P15941-11)
MTPGTQSPFFLLLLLTVLTATTAPKPATVVTGSGHASSTPGGEKETSATQRSSVPSSTEKNAFNSSLEDPSTDYYQELQRDISEMFLQIYKQGGFLGLSNIKFRPGSVVVQLTLAFREGTINVHDVETQFNQYKTEAASRYNLTISDVSVSDVPFPFSAQSGAGVPGWGIALLVLVCVLVALAIVYLIALAVCQCRRKNYGQLDIFPARDTYHPMSEYPTYHTHGRYVPPSSTDRSPYEKVSAGNGGSSLSYTNPAVAATSANL

SEQ ID NO: 193 - protein, 159 aa, Artificial Sequence
  CA-15-3 biomarker (UniProt: P15941-12)
MTPGTQSPFFLLLLLTVLTATTAPKPATVVTGSGHASSTPGGEKETSATQRSSVPSSTEKNAFNSSLEDPSTDYYQELQRDISEMAVCQCRRKNYGQLDIFPARDTYHPMSEYPTYHTHGRYVPPSSTDRSPYEKVSAGNGGSSLSYTNPAVAATSANL

SEQ ID NO: 194 - protein, 198 aa, Artificial Sequence
  CA-15-3 biomarker (UniProt: P15941-13)
MTPGTQSPFFLLLLLTVLTVVTGSGHASSTPGGEKETSATQRSSVPSSTEKNALSTGVSFFFLSFHISNLQFNSSLEDPSTDYYQELQRDISEMFLQIYKQGGFLGLSNIKFRPGSVVVQLTLAFREGTINVHDVETQFNQYKTEAASRYNLTISDVSGCLSVPPKELRAAGHLSSPGYLPSYERVPHLPHPWALCAP

SEQ ID NO: 195 - protein, 96 aa, Artificial Sequence
  CA-15-3 biomarker (UniProt: P15941-14)
MTPGTQSPFFLLLLLTVLTVVTGSGHASSTPGGEKETSATQRSSVPSSTEKNAIPAPTTTKSCRETFLKCFCRFINKGVFWASPILSSGQDLWWYN

SEQ ID NO: 196 - protein, 224 aa, Artificial Sequence
  CA-15-3 biomarker (UniProt: P15941-15)
MTPGTQSPFFLLLLLTVLTATTAPKPATVVTGSGHASSTPGGEKETSATQRSSVPSSTEKNAFRPGSVVVQLTLAFREGTINVHDVETQFNQYKTEAASRYNLTISDVSVSDVPFPFSAQSGAGVPGWGIALLVLVCVLVALAIVYLIALAVCQCRRKNYGQLDIFPARDTYHPMSEYPTYHTHGRYVPPSSTDRSPYEKVSAGNGGSSLSYTNPAVAATSANL

SEQ ID NO: 197 - protein, 166 aa, Artificial Sequence
  CA-15-3 biomarker (UniProt: P15941-16)
MTPGTQSPFFLLLLLTVLTATTAPKPATVVTGSGHASSTPGGEKETSATQRSSVPSSTEKNASGAGVPGWGIALLVLVCVLVALAIVYLIALAVCQCRRKNYGQLDIFPARDTYHPMSEYPTYHTHGRYVPPSSTDRSPYEKVSAGNGGSSLSYTNPAVAATSANL

SEQ ID NO: 198 - protein, 259 aa, Artificial Sequence
  CA-15-3 biomarker (UniProt: P15941-17)
MTPGTQSPFFLLLLLTVLTATTAPKPATVVTGSGHASSTPGGEKETSATQRSSVPSSTEKNAFNSSLEDPSTDYYQELQRDISEMFLQIYKQGGFLGLSNIKFRPGSVVVQLTLAFREGTINVHDVETQFNQYKTEAASRYNLTISDVSVSDVPFPFSAQSGAGVPGWGIALLVLVCVLVALAIVYLIALAVCQCRRKNYGQLDIFPARDTYHPMSEYPTYHTHGRYVPPSSTDRSPYEKRQNGWSTMPRGALPEESQG

SEQ ID NO: 199 - protein, 388 aa, Artificial Sequence
  PGI biomarker (UniProt: P0DJD8) (entry version 50)
MKWLLLLGLVALSECIMYKVPLIRKKSLRRTLSERGLLKDFLKKHNLNPARKYFPQWKAPTLVDEQPLENYLDMEYFGTIGIGTPAQDFTVVFDTGSSNLWVPSVYCSSLACTNHNRFNPEDSSTYQSTSETVSITYGTGSMTGILGYDTVQVGGISDTNQIFGLSETEPGSFLYYAPFDGILGLAYPSISSSGATPVFDNIWNQGLVSQDLFSVYLSADDQSGSVVIFGGIDSSYYTGSLNWVPVTVEGYWQITVDSITMNGEAIACAEGCQAIVDTGTSLLTGPTSPIANIQSDIGASENSDGDMVVSCSAISSLPDIVFTINGVQYPVPPSAYILQSEGSCISGFQGMNLPTESGELWILGDVFIRQYFTVFDRANNQVGLAPVA

SEQ ID NO: 200 - protein, 317 aa, Artificial Sequence [sequence omitted]

SEQ ID NO: 201 - protein, 83 aa, Artificial Sequence
  Apo C-I biomarker (UniProt: P02654) (entry version 175)
MRLFLSLPVLVVVLSIVLEGPAPAQGTPDVSSALDKLKEFGNTLEDKARELISRIKQSELSAKMREWFSETFQKVKEKLKIDS

SEQ ID NO: 202 - protein, 711 aa, Artificial Sequence
  MSP biomarker (UniProt: P26927) (entry version 179)
MGWLPLLLLLTQCLGVPGQRSPLNDFQVLRGTELQHLLHAVVPGPWQEDVADAEECAGRCGPLMDCRAFHYNVSSHGCQLLPWTQHSPHTRLRRSGRCDLFQKKDYVRTCIMNNGVGYRGTMATTVGGLPCQAWSHKFPNDHKYTPTLRNGLEENFCRNPDGDPGGPWCYTTDPAVRFQSCGIKSCREAACVWCNGEEYRGAVDRTESGRECQRWDLQHPHQHPFEPGKFLDQGLDDNYCRNPDGSERPWCYTTDPQIEREFCDLPRCGSEAQPRQEATTVSCFRGKGEGYRGTANTTTAGVPCQRWDAQIPHQHRFTPEKYACKDLRENFCRNPDGSEAPWCFTLRPGMRAAFCYQIRRCTDDVRPQDCYHGAGEQYRGTVSKTRKGVQCQRWSAETPHKPQFTFTSEPHAQLEENFCRNPDGDSHGPWCYTMDPRTPFDYCALRRCADDQPPSILDPPDQVQFEKCGKRVDRLDQRRSKLRVVGGHPGNSPWTVSLRNRQGQHFCGGSLVKEQWILTARQCFSSCHMPLTGYEVWLGTLFQNPQHGEPSLQRVPVAKMVCGPSGSQLVLLKLERSVTLNQRVALICLPPEWYVVPPGTKCEIAGWGETKGTGNDTVLNVALLNVISNQECNIKHRGRVRESEMCTEGLLAPVGACEGDYGGPLACFTHNCWVLEGIIIPNRVCARSRWPAVFTRVSVFVDWIHKVMRLG

SEQ ID NO: 203 - protein, 113 aa, Artificial Sequence
  CCL 15 biomarker (UniProt: Q16663) (entry version 161)
MKVSVAALSCLMLVAVLGSQAQFINDAETELMMSKLPLENPVVLNSFHFAADCCTSYISQSIPCSLMKSYFETSSECSKPGVIFLTKKGRQVCAKPSGPGVQDCMKKLKPYSI

SEQ ID NO: 204 - protein, 593 aa, Artificial Sequence
  Progranulin biomarker (UniProt: P28799-1) (entry version 197)
MWTLVSWVALTAGLVAGTRCPDGQFCPVACCLDPGGASYSCCRPLLDKWPTTLSRHLGGPCQVDAHCSAGHSCIFTVSGTSSCCPFPEAVACGDGHHCCPRGFHCSADGRSCFQRSGNNSVGAIQCPDSQFECPDFSTCCVMVDGSWGCCPMPQASCCEDRVHCCPHGAFCDLVHTRCITPTGTHPLAKKLPAQRTNRAVALSSSVMCPDARSRCPDGSTCCELPSGKYGCCPMPNATCCSDHLHCCPQDTVCDLIQSKCLSKENATTDLLTKLPAHTVGDVKCDMEVSCPDGYTCCRLQSGAWGCCPFTQAVCCEDHIHCCPAGFTCDTQKGTCEQGPHQVPWMEKAPAHLSLPDPQALKRDVPCDNVSSCPSSDTCCQLTSGEWGCCPIPEAVCCSDHQHCCPQGYTCVAEGQCQRGSEIVAGLEKMPARRASLSHPRDIGCDQHTSCPVGQTCCPSLGGSWACCQLPHAVCCEDRQHCCPAGYTCNVKARSCEKEVVSAQPATFLARSPHVGVKDVECGEGHFCHDNQTCCRDNRQGWACCPYRQGVCCADRRHCCPAGFRCAARGTKCLRREAPRWDAPLRDPALRQLL

SEQ ID NO: 205 - protein, 438 aa, Artificial Sequence
  Progranulin biomarker (UniProt: P28799-2)
MWTLVSWVALTAGLVAGTRCPDGQFCPVACCLDPGGASYSCCRPLLDKWPTTLSRHLGGPCQVDAHCSAGHSCIFTVSGTSSCCPFPEAVACGDGHHCCPRGFHCSADGRSCFQRSGNNSVGAIQCPDSQFECPDFSTCCVMVDGSWGCCPMPQASCCEDRVHCCPHGAFCDLVHTRCITPTGTHPLAKKLPAQRTNRAVALSSSVMCPDARSRCPDGSTCCELPSGKYGCCPMPNATCCSDHLHCCPQDTVCDLIQSKCLSKENATTDLLTKLPAHTVGDVKCDMEVSCPDGYTCCRLQSGAWGCCPFTQAVCCEDHIHCCPAGFTCDTQKGTCEQGPHQVPWMEKAPAHLSLPDPQALKRDVPCDNVSSCPSSDTCCRDNRQGWACCPYRQGVCCADRRHCCPAGFRCAARGTKCLRREAPRWDAPLRDPALRQLL

SEQ ID NO: 206 - protein, 413 aa, Artificial Sequence
  Progranulin biomarker (UniProt: P28799-3)
MAITAAHGASTAVQTGDPASKDQVTTPWVPSSALIVSSNARTSPRAVLWSMAPGGAAPCPRLPAVKTGCTAVCDLIQSKCLSKENATTDLLTKLPAHTVGDVKCDMEVSCPDGYTCCRLQSGAWGCCPFTQAVCCEDHIHCCPAGFTCDTQKGTCEQGPHQVPWMEKAPAHLSLPDPQALKRDVPCDNVSSCPSSDTCCQLTSGEWGCCPIPEAVCCSDHQHCCPQGYTCVAEGQCQRGSEIVAGLEKMPARRASLSHPRDIGCDQHTSCPVGQTCCPSLGGSWACCQLPHAVCCEDRQHCCPAGYTCNVKARSCEKEVVSAQPATFLARSPHVGVKDVECGEGHFCHDNQTCCRDNRQGWACCPYRQGVCCADRRHCCPAGFRCAARGTKCLRREAPRWDAPLRDPALRQLL

SEQ ID NO: 207 - protein, 526 aa, Artificial Sequence
  CEACAM1 biomarker (UniProt: P13688-1) (entry version 197)
MGHLSAPLHRVRVPWQGLLLTASLLTFWNPPTTAQLTTESMPFNVAEGKEVLLLVHNLPQQLFGYSWYKGERVDGNRQIVGYAIGTQQATPGPANSGRETIYPNASLLIQNVTQNDTGFYTLQVIKSDLVNEEATGQFHVYPELPKPSISSNNSNPVEDKDAVAFTCEPETQDTTYLWWINNQSLPVSPRLQLSNGNRTLTLLSVTRNDTGPYECEIQNPVSANRSDPVTLNVTYGPDTPTISPSDTYYRPGANLSLSCYAASNPPAQYSWLINGTFQQSTQELFIPNITVNNSGSYTCHANNSVTGCNRTTVKTIIVTELSPVVAKPQIKASKTTVTGDKDSVNLTCSTNDTGISIRWFFKNQSLPSSERMKLSQGNTTLSINPVKREDAGTYWCEVFNPISKNQSDPIMLNVNYNALPQENGLSPGAIAGIVIGVVALVALIAVALACFLHFGKTGRASDQRDLTEHKPSVSNHTQDHSNDPPNKMNEVTYSTLNFEAQQPTQPTSASPSLTATEIIYSEVKKQ

SEQ ID NO: 208 - protein, 417 aa, Artificial Sequence
  CEACAM1 biomarker (UniProt: P13688-2)
MGHLSAPLHRVRVPWQGLLLTASLLTFWNPPTTAQLTTESMPFNVAEGKEVLLLVHNLPQQLFGYSWYKGERVDGNRQIVGYAIGTQQATPGPANSGRETIYPNASLLIQNVTQNDTGFYTLQVIKSDLVNEEATGQFHVYPELPKPSISSNNSNPVEDKDAVAFTCEPETQDTTYLWWINNQSLPVSPRLQLSNGNRTLTLLSVTRNDTGPYECEIQNPVSANRSDPVTLNVTYGPDTPTISPSDTYYRPGANLSLSCYAASNPPAQYSWLINGTFQQSTQELFIPNITVNNSGSYTCHANNSVTGCNRTTVKTIIVTELSPVVAKPQIKASKTTVTGDKDSVNLTCSTNDTGISIRWFFKNQSLPSSERMKLSQGNTTLSINPVKREDAGTYWCEVFNPISKNQSDPIMLNVNCK

SEQ ID NO: 209 - protein, 321 aa, Artificial Sequence
  CEACAM1 biomarker (UniProt: P13688-3)
MGHLSAPLHRVRVPWQGLLLTASLLTFWNPPTTAQLTTESMPFNVAEGKEVLLLVHNLPQQLFGYSWYKGERVDGNRQIVGYAIGTQQATPGPANSGRETIYPNASLLIQNVTQNDTGFYTLQVIKSDLVNEEATGQFHVYPELPKPSISSNNSNPVEDKDAVAFTCEPETQDTTYLWWINNQSLPVSPRLQLSNGNRTLTLLSVTRNDTGPYECEIQNPVSANRSDPVTLNVTYGPDTPTISPSDTYYRPGANLSLSCYAASNPPAQYSWLINGTFQQSTQELFIPNITVNNSGSYTCHANNSVTGCNRTTVKTIIVTGK

SEQ ID NO: 210 - protein, 351 aa, Artificial Sequence
  CEACAM1 biomarker (UniProt: P13688-4)
MGHLSAPLHRVRVPWQGLLLTASLLTFWNPPTTAQLTTESMPFNVAEGKEVLLLVHNLPQQLFGYSWYKGERVDGNRQIVGYAIGTQQATPGPANSGRETIYPNASLLIQNVTQNDTGFYTLQVIKSDLVNEEATGQFHVYPELPKPSISSNNSNPVEDKDAVAFTCEPETQDTTYLWWINNQSLPVSPRLQLSNGNRTLTLLSVTRNDTGPYECEIQNPVSANRSDPVTLNVTYGPDTPTISPSDTYYRPGANLSLSCYAASNPPAQYSWLINGTFQQSTQELFIPNITVNNSGSYTCHANNSVTGCNRTTVKTIIVTESPVLGEDEAVPGQHHPQHKPCQEGGCWDVLV

SEQ ID NO: 211 - protein, 461 aa, Artificial Sequence
  CEACAM1 biomarker (UniProt: P13688-5)
MGHLSAPLHRVRVPWQGLLLTASLLTFWNPPTTAQLTTESMPFNVAEGKEVLLLVHNLPQQLFGYSWYKGERVDGNRQIVGYAIGTQQATPGPANSGRETIYPNASLLIQNVTQNDTGFYTLQVIKSDLVNEEATGQFHVYPELPKPSISSNNSNPVEDKDAVAFTCEPETQDTTYLWWINNQSLPVSPRLQLSNGNRTLTLLSVTRNDTGPYECEIQNPVSANRSDPVTLNVTYGPDTPTISPSDTYYRPGANLSLSCYAASNPPAQYSWLINGTFQQSTQELFIPNITVNNSGSYTCHANNSVTGCNRTTVKTIIVTERQNLTMLPRLDSNSWAQAILPSVSQSAEITDNALPQENGLSPGAIAGIVIGVVALVALIAVALACFLHFGKTGRASDQRDLTEHKPSVSNHTQDHSNDPPNKMNEVTYSTLNFEAQQPTQPTSASPSLTATEIIYSEVKKQ

SEQ ID NO: 212 - protein, 430 aa, Artificial Sequence
  CEACAM1 biomarker (UniProt: P13688-6)
MGHLSAPLHRVRVPWQGLLLTASLLTFWNPPTTAQLTTESMPFNVAEGKEVLLLVHNLPQQLFGYSWYKGERVDGNRQIVGYAIGTQQATPGPANSGRETIYPNASLLIQNVTQNDTGFYTLQVIKSDLVNEEATGQFHVYPELPKPSISSNNSNPVEDKDAVAFTCEPETQDTTYLWWINNQSLPVSPRLQLSNGNRTLTLLSVTRNDTGPYECEIQNPVSANRSDPVTLNVTYGPDTPTISPSDTYYRPGANLSLSCYAASNPPAQYSWLINGTFQQSTQELFIPNITVNNSGSYTCHANNSVTGCNRTTVKTIIVTDNALPQENGLSPGAIAGIVIGVVALVALIAVALACFLHFGKTGRASDQRDLTEHKPSVSNHTQDHSNDPPNKMNEVTYSTLNFEAQQPTQPTSASPSLTATEIIYSEVKKQ

SEQ ID NO: 213 - protein, 252 aa, Artificial Sequence
  CEACAM1 biomarker (UniProt: P13688-7)
MGHLSAPLHRVRVPWQGLLLTASLLTFWNPPTTAQLTTESMPFNVAEGKEVLLLVHNLPQQLFGYSWYKGERVDGNRQIVGYAIGTQQATPGPANSGRETIYPNASLLIQNVTQNDTGFYTLQVIKSDLVNEEATGQFHVYPNALPQENGLSPGAIAGIVIGVVALVALIAVALACFLHFGKTGRASDQRDLTEHKPSVSNHTQDHSNDPPNKMNEVTYSTLNFEAQQPTQPTSASPSLTATEIIYSEVKKQ

SEQ ID NO: 214 - protein, 464 aa, Artificial Sequence
  CEACAM1 biomarker (UniProt: P13688-8)
MGHLSAPLHRVRVPWQGLLLTASLLTFWNPPTTAQLTTESMPFNVAEGKEVLLLVHNLPQQLFGYSWYKGERVDGNRQIVGYAIGTQQATPGPANSGRETIYPNASLLIQNVTQNDTGFYTLQVIKSDLVNEEATGQFHVYPELPKPSISSNNSNPVEDKDAVAFTCEPETQDTTYLWWINNQSLPVSPRLQLSNGNRTLTLLSVTRNDTGPYECEIQNPVSANRSDPVTLNVTYGPDTPTISPSDTYYRPGANLSLSCYAASNPPAQYSWLINGTFQQSTQELFIPNITVNNSGSYTCHANNSVTGCNRTTVKTIIVTELSPVVAKPQIKASKTTVTGDKDSVNLTCSTNDTGISIRWFFKNQSLPSSERMKLSQGNTTLSINPVKREDAGTYWCEVFNPISKNQSDPIMLNVNYNALPQENGLSPGAIAGIVIGVVALVALIAVALACFLHFGKTGSSGPLQ

SEQ ID NO: 215 - protein, 399 aa, Artificial Sequence
  CEACAM1 biomarker (UniProt: P13688-9)
MGHLSAPLHRVRVPWQGLLLTASLLTFWNPPTTAQLTTESMPFNVAEGKEVLLLVHNLPQQLFGYSWYKGERVDGNRQIVGYAIGTQQATPGPANSGRETIYPNASLLIQNVTQNDTGFYTLQVIKSDLVNEEATGQFHVYPELPKPSISSNNSNPVEDKDAVAFTCEPETQDTTYLWWINNQSLPVSPRLQLSNGNRTLTLLSVTRNDTGPYECEIQNPVSANRSDPVTLNVTYGPDTPTISPSDTYYRPGANLSLSCYAASNPPAQYSWLINGTFQQSTQELFIPNITVNNSGSYTCHANNSVTGCNRTTVKTIIVTEMAFHHVAKAGLKLLSSSNPPASTSQSAKITDNALPQENGLSPGAIAGIVIGVVALVALIAVALACFLHFGKTGSSGPLQ

SEQ ID NO: 216 - protein, 468 aa, Artificial Sequence
  CEACAM1 biomarker (UniProt: P13688-10)
MGHLSAPLHRVRVPWQGLLLTASLLTFWNPPTTAQLTTESMPFNVAEGKEVLLLVHNLPQQLFGYSWYKGERVDGNRQIVGYAIGTQQATPGPANSGRETIYPNASLLIQNVTQNDTGFYTLQVIKSDLVNEEATGQFHVYPELPKPSISSNNSNPVEDKDAVAFTCEPETQDTTYLWWINNQSLPVSPRLQLSNGNRTLTLLSVTRNDTGPYECEIQNPVSANRSDPVTLNVTYGPDTPTISPSDTYYRPGANLSLSCYAASNPPAQYSWLINGTFQQSTQELFIPNITVNNSGSYTCHANNSVTGCNRTTVKTIIVTELSPVVAKPQIKASKTTVTGDKDSVNLTCSTNDTGISIRWFFKNQSLPSSERMKLSQGNTTLSINPVKREDAGTYWCEVFNPISKNQSDPIMLNVNYNALPQENGLSPGAIAGIVIGVVALVALIAVALACFLHFGKTGRTTPMTHLTR

SEQ ID NO: 217 - protein, 368 aa, Artificial Sequence
  CEACAM1 biomarker (UniProt: P13688-11)
MGHLSAPLHRVRVPWQGLLLTASLLTFWNPPTTAQLTTESMPFNVAEGKEVLLLVHNLPQQLFGYSWYKGERVDGNRQIVGYAIGTQQATPGPANSGRETIYPNASLLIQNVTQNDTGFYTLQVIKSDLVNEEATGQFHVYPELPKPSISSNNSNPVEDKDAVAFTCEPETQDTTYLWWINNQSLPVSPRLQLSNGNRTLTLLSVTRNDTGPYECEIQNPVSANRSDPVTLNVTYGPDTPTISPSDTYYRPGANLSLSCYAASNPPAQYSWLINGTFQQSTQELFIPNITVNNSGSYTCHANNSVTGCNRTTVKTIIVTDNALPQENGLSPGAIAGIVIGVVALVALIAVALACFLHFGKTGSSGPLQ

SEQ ID NO: 218 - protein, 459 aa, Artificial Sequence
  CA-9 (UniProt: Q16790) (entry version 171)
MAPLCPSPWLPLLIPAPAPGLTVQLLLSLLLLVPVHPQRLPRMQEDSPLGGGSSGEDDPLGEEDLPSEEDSPREEDPPGEEDLPGEEDLPGEEDLPEVKPKSEEEGSLKLEDLPTVEAPGDPQEPQNNAHRDKEGDDQSHWRYGGDPPWPRVSPACAGRFQSPVDIRPQLAAFCPALRPLELLGFQLPPLPELRLRNNGHSVQLTLPPGLEMALGPGREYRALQLHLHWGAAGRPGSEHTVEGHRFPAEIHVVHLSTAFARVDEALGRPGGLAVLAAFLEEGPEENSAYEQLLSRLEEIAEEGSETQVPGLDISALLPSDFSRYFQYEGSLTTPPCAQGVIWTVFNQTVMLSAKQLHTLSDTLWGPGDSRLQLNFRATQPLNGRVIEASFPAGVDSSPRAAEPVQLNSCLAAGDILALVFGLLFAVTSVAFLVQMRRQHRRGTKGGVSYRPAEVAETGA

SEQ ID NO: 219 - protein, 314 aa, Artificial Sequence
  EpCam biomarker (UniProt: P16422-1) (entry version 186)
MAPPQVLAFGLLLAAATATFAAAQEECVCENYKLAVNCFVNNNRQCQCTSVGAQNTVICSKLAAKCLVMKAEMNGSKLGRRAKPEGALQNNDGLYDPDCDESGLFKAKQCNGTSMCWCVNTAGVRRTDKDTEITCSERVRTYWIIIELKHKAREKPYDSKSLRTALQKEITTRYQLDPKFITSILYENNVITIDLVQNSSQKTQNDVDIADVAYYFEKDVKGESLFHSKKMDLTVNGEQLDLDPGQTLIYYVDEKAPEFSMQGLKAGVIAVIVVVVIAVVAGIVVLVISRKKRMAKYEKAEIKEMGEMHRELNA

SEQ ID NO: 220 - protein, 367 aa, Artificial Sequence
  Fetuin-A biomarker (UniProt: P02765-1) (entry version 205)
MKSLVLLLCLAQLWGCHSAPHGPGLIYRQPNCDDPETEEAALVAIDYINQNLPWGYKHTLNQIDEVKVWPQQPSGELFEIEIDTLETTCHVLDPTPVARCSVRQLKEHAVEGDCDFQLLKLDGKFSVVYAKCDSSPDSAEDVRKVCQDCPLLAPLNDTRVVHAAKAALAAFNAQNNGSNFQLEEISRAQLVPLPPSTYVEFTVSGTDCVAKEATEAAKCNLLAEKQYGFCKATLSEKLGGAEVAVTCMVFQTQPVSSQPQPEGANEAVPTPVVDPDAPPSPPLGAPGLPPAGSPPDSHVLLAAPPGHQLHRAHYDLRHTFMGVVSLGSPSGEVSHPRKTRTVVQPSVGAAAGPVVPPCPGRIRHFKV

SEQ ID NO: 221 - protein, 330 aa, Artificial Sequence
  CFHR1 biomarker (UniProt: Q03591-1) (entry version 162)
MWLLVSVILISRISSVGGEATFCDFPKINHGILYDEEKYKPFSQVPTGEVFYYSCEYNFVSPSKSFWTRITCTEEGWSPTPKCLRLCFFPFVENGHSESSGQTHLEGDTVQIICNTGYRLQNNENNISCVERGWSTPPKCRSTDTSCVNPPTVQNAHILSRQMSKYPSGERVRYECRSPYEMFGDEEVMCLNGNWTEPPQCKDSTGKCGPPPPIDNGDITSFPLSVYAPASSVEYQCQNLYQLEGNKRITCRNGQWSEPPKCLHPCVISREIMENYNIALRWTAKQKLYLRTGESAEFVCKRGYRLSSRSHTLRTTCWDGKLEYPTCAKR

SEQ ID NO: 222 - protein, 308 aa, Artificial Sequence
  GDF-15 biomarker (UniProt: Q99988-1) (entry version 166)
MPGQELRTVNGSQMLLVLLVLSWLPHGGALSLAEASRASFPGPSELHSEDSRFRELRKRYEDLLTRLRANQSWEDSNTDLVPAPAVRILTPEVRLGSGGHLHLRISRAALPEGLPEASRLHRALFRLSPTASRSWDVTRPLRRQLSLARPQAPALHLRLSPPPSQSDQLLAESSSARPQLELHLRPQAARGRRRARARNGDHCPLGPGRCCRLHTVRASLEDLGWADWVLSPREVQVTMCIGACPSQFRAANMHAQIKTSLHRLKPDTVPAPCCVPASYNPMVLIQKTDTGVSLQTYDDLLAKDCHCI

SEQ ID NO: 223 - protein, 355 aa, Artificial Sequence [sequence omitted]

SEQ ID NO: 224 - protein, 110 aa, Artificial Sequence
  insulin (C-peptide) (UniProt: P27169-1) (entry version 245)
MALWMRLLPLLALLALWGPDPAAAFVNQHLCGSHLVEALYLVCGERGFFYTPKTRREAEDLQVGQVELGGGPGAGSLQPLALEGSLQKRGIVEQCCTSICSLYQLENYCN

SEQ ID NO: 225 - protein, 200 aa, Artificial Sequence
  insulin (C-peptide) biomarker (UniProt: F8WCM5-1) (entry version 57)
MALWMRLLPLLALLALWGPDPAAAFVNQHLCGSHLVEALYLVCGERGFFYTPKTRREAEDLQASALSLSSSTSTWPEGLDATARAPPALVVTANIGQAGGSSSRQFRQRALGTSDSPVLFIHCPGAAGTAQGLEYRGRRVTTELVWEEVDSSPQPQGSESLPAQPPAQPAPQPEPQQAREPSPEVSCCGLWPRRPQRSQN

SEQ ID NO: 226 - protein, 100 aa, Artificial Sequence
  Apo A-II biomarker (UniProt: P02652-1) (entry version 180)
MKLLAATVLLLTICSLEGALVRRQAKEPCVESLVSQYFQTVTDYGKDLMEKVKSPELQAEAKSYFEKSKEQLTPLIKKAGTELVNFLSYFVELGTQPATQ

SEQ ID NO: 227 - skipped

SEQ ID NO: 228 - protein, 609 aa, Artificial Sequence
  AFP biomarker (UniProt: P02771-1) (entry version 192)
MKWVESIFLIFLLNFTESRTLHRNEYGIASILDSYQCTAEISLADLATIFFAQFVQEATYKEVSKMVKDALTAIEKPTGDEQSSGCLENQLPAFLEELCHEKEILEKYGHSDCCSQSEEGRHNCFLAHKKPTPASIPLFQVPEPVTSCEAYEEDRETFMNKFIYEIARRHPFLYAPTILLWAARYDKIIPSCCKAENAVECFQTKAATVTKELRESSLLNQHACAVMKNFGTRTFQAITVTKLSQKFTKVNFTEIQKLVLDVAHVHEHCCRGDVLDCLQDGEKIMSYICSQQDTLSNKITECCKLTTLERGQCIIHAENDEKPEGLSPNLNRFLGDRDFNQFSSGEKNIFLASFVHEYSRRHPQLAVSVILRVAKGYQELLEKCFQTENPLECQDKGEEELQKYIQESQALAKRSCGLFQKLGEYYLQNAFLVAYTKKAPQLTSSELMAITRKMAATAATCCQLSEDKLLACGEGAADIIIGHLCIRHEMTPVNPGVGQCCTSSYANRRPCFSSLVVDETYVPPAFSDDKFIFHKDLCQAQGVALQTMKQEFLINLVKQKPQITEEQLEAVIADFSGLLEKCCQGQEQEVCFAEEGQKLISKTRAALGV

SEQ ID NO: 229 - protein, 364 aa, Artificial Sequence
  KIM-1 biomarker (UniProt: Q96D42-1) (entry version 141)
MHPQVVILSLILHLADSVAGSVKVGGEAGPSVTLPCHYSGAVTSMCWNRGSCSLFTCQNGIVWTNGTHVTYRKDTRYKLLGDLSRRDVSLTIENTAVSDSGVYCCRVEHRGWFNDMKITVSLEIVPPKVTTTPIVTTVPTVTTVRTSTTVPTTTTVPMTTVPTTTVPTTMSIPTTTTVLTTMTVSTTTSVPTTTSIPTTTSVPVTTTVSTFVPPMPLPRQNHEPVATSPSSPQPAETHPTTLQGAIRREPTSSPLYSYTTDGNDTVTESSDGLWNNNQTQLFLEHSLLTANTTKGIYAGVCISVLVLLALLGVIIAKKYFFKKEVQQLSVSFSSLQIKALQNAVEKEVQAEDNIYIENSLYATD

SEQ ID NO: 230 - protein, 277 aa, Artificial Sequence
  CD40 biomarker (UniProt: P25942-1) (entry version 221)
MVRLPLQCVLWGCLLTAVHPEPPTACREKQYLINSQCCSLCQPGQKLVSDCTEFTETECLPCGESEFLDTWNRETHCHQHKYCDPNLGLRVQQKGTSETDTICTCEEGWHCTSEACESCVLHRSCSPGFGVKQIATGVSDTICEPCPVGFFSNVSSAFEKCHPWTSCETKDLVVQQAGTNKTDVVCGPQDRLRALVVIPIIFGILFAILLVLVFIKKVAKKPTNKAPHPKQEPQEINFPDDLPGSNTAAPVQETLHGCQPVTQEDGKESRISVQERQ

SEQ ID NO: 231 - protein, 203 aa, Artificial Sequence
  CD40 biomarker (UniProt: P25942-2)
MVRLPLQCVLWGCLLTAVHPEPPTACREKQYLINSQCCSLCQPGQKLVSDCTEFTETECLPCGESEFLDTWNRETHCHQHKYCDPNLGLRVQQKGTSETDTICTCEEGWHCTSEACESCVLHRSCSPGFGVKQIATGVSDTICEPCPVGFFSNVSSAFEKCHPWTRSPGSAESPGGDPHHLRDPVCHPLGAGLYQKGGQEANQ

SEQ ID NO: 232 - protein, 457 aa, Artificial Sequence
  CgA biomarker (UniProt: P10645-1) (entry version 200)
MRSAAVLALLLCAGQVTALPVNSPMNKGDTEVMKCIVEVISDTLSKPSPMPVSQECFETLRGDERILSILRHQNLLKELQDLALQGAKERAHQQKKHSGFEDELSEVLENQSSQAELKEAVEEPSSKDVMEKREDSKEAEKSGEATDGARPQALPEPMQESKAEGNNQAPGEEEEEEEEATNTHPPASLPSQKYPGPQAEGDSEGLSQGLVDREKGLSAEPGWQAKREEEEEEEEEAEAGEEAVPEEEGPTVVLNPHPSLGYKEIRKGESRSEALAVDGAGKPGAEEAQDPEGKGEQEHSQQKEEEEEMAVVPQGLFRGGKSGELEQEEERLSKEWEDSKRWSKMDQLAKELTAEKRLEGQEEEEDNRDSSMKLSFRARAYGFRGPGPQLRRGWRPSSREDSLEAGLPLQVRGYPEEKKEEEGSANRRPEDQELESLSAIEAELEKVAHQLQALRRG

SEQ ID NO: 233 - protein, 272 aa, Artificial Sequence
  IL-2 receptor alpha biomarker (UniProt: P01589-1) (entry version 200)
MDSYLLMWGLLTFIMVPGCQAELCDDDPPEIPHATFKAMAYKEGTMLNCECKRGFRRIKSGSLYMLCTGNSSHSSWDNQCQCTSSATRNTTKQVTPQPEEQKERKTTEMQSPMQPVDQASLPGHCREPPPWENEATERIYHFVVGQMVYYQCVQGYRALHRGPAESVCKMTHGKTRWTQPQLICTGEMETSQFPGEEKPQASPEGRPESETSCLVTTTDFQIQTEMAATMETSIFTTEYQVAVAGCVFLLISVLLLSGLTWQRRQRKSRRTI

SEQ ID NO: 234 - protein, 165 aa, Artificial Sequence
  hCG biomarker (UniProt: P0DN86-1 ) (entry version 26)
MEMFQGLLLLLLLSMGGTWASKEPLRPRCRPINATLAVEKEGCPVCITVNTTICAGYCPTMTRVLQGVLPALPQVVCNYRDVRFESIRLPGCPRGVNPVVSYAVALSCQCALCRRSTTDCGGPKDHPLTCDDPRFQDSSSSKAPPPSLPSPSRLPGPSDTPILPQ

SEQ ID NO: 235 - protein, 181 aa, Artificial Sequence
  hCG biomarker (UniProt: P0DN86-1 )
MGRPGLGAAVSDPGEAVSLSQGLLLLLLLSMGGTWASKEPLRPRCRPINATLAVEKEGCPVCITVNTTICAGYCPTMTRVLQGVLPALPQVVCNYRDVRFESIRLPGCPRGVNPVVSYAVALSCQCALCRRSTTDCGGPKDHPLTCDDPRFQDSSSSKAPPPSLPSPSRLPGPSDTPILPQ

SEQ ID NO: 236 - protein, 94 aa, Artificial Sequence
  TARC biomarker (UniProt: Q92583-1) (entry version 163)
MAPLKMLALVTLLLGASLQHIHAARGTNVGRECCLEYFKGAIPLRKLKTWYQTSEDCSRDAIVFVTVQGRAICSDPNNKRVKNAVKYLQSLERS

SEQ ID NO: 237 - protein, 1363 aa, Artificial Sequence
  VEGFR-3 biomarker (UniProt: P35916-1) (entry version 206)
MQRGAALCLRLWLCLGLLDGLVSGYSMTPPTLNITEESHVIDTGDSLSISCRGQHPLEWAWPGAQEAPATGDKDSEDTGVVRDCEGTDARPYCKVLLLHEVHANDTGSYVCYYKYIKARIEGTTAASSYVFVRDFEQPFINKPDTLLVNRKDAMWVPCLVSIPGLNVTLRSQSSVLWPDGQEVVWDDRRGMLVSTPLLHDALYLQCETTWGDQDFLSNPFLVHITGNELYDIQLLPRKSLELLVGEKLVLNCTVWAEFNSGVTFDWDYPGKQAERGKWVPERRSQQTHTELSSILTIHNVSQHDLGSYVCKANNGIQRFRESTEVIVHENPFISVEWLKGPILEATAGDELVKLPVKLAAYPPPEFQWYKDGKALSGRHSPHALVLKEVTEASTGTYTLALWNSAAGLRRNISLELVVNVPPQIHEKEASSPSIYSRHSRQALTCTAYGVPLPLSIQWHWRPWTPCKMFAQRSLRRRQQQDLMPQCRDWRAVTTQDAVNPIESLDTWTEFVEGKNKTVSKLVIQNANVSAMYKCVVSNKVGQDERLIYFYVTTIPDGFTIESKPSEELLEGQPVLLSCQADSYKYEHLRWYRLNLSTLHDAHGNPLLLDCKNVHLFATPLAASLEEVAPGARHATLSLSIPRVAPEHEGHYVCEVQDRRSHDKHCHKKYLSVQALEAPRLTQNLTDLLVNVSDSLEMQCLVAGAHAPSIVWYKDERLLEEKSGVDLADSNQKLSIQRVREEDAGRYLCSVCNAKGCVNSSASVAVEGSEDKGSMEIVILVGTGVIAVFFWVLLLLIFCNMRRPAHADIKTGYLSIIMDPGEVPLEEQCEYLSYDASQWEFPRERLHLGRVLGYGAFGKVVEASAFGIHKGSSCDTVAVKMLKEGATASEHRALMSELKILIHIGNHLNVVNLLGACTKPQGPLMVIVEFCKYGNLSNFLRAKRDAFSPCAEKSPEQRGRFRAMVELARLDRRRPGSSDRVLFARFSKTEGGARRASPDQEAEDLWLSPLTMEDLVCYSFQVARGMEFLASRKCIHRDLAARNILLSESDVVKICDFGLARDIYKDPDYVRKGSARLPLKWMAPESIFDKVYTTQSDVWSFGVLLWEIFSLGASPYPGVQINEEFCQRLRDGTRMRAPELATPAIRRIMLNCWSGDPKARPAFSELVEILGDLLQGRGLQEEEEVCMAPRSSQSSEEGSFSQVSTMALHIAQADAEDSPPSLQRHSLAARYYNWVSFPGCLARGAETRGSSRMKTFEEFPMTPTTYKGSVDNQTDSGMVLASEEFEQIESRHRQESGFSCKGPGQNVAVTRAHPDSQGRRRRPERGARGGQVFYNSEYGELSEPSEEDHCSPSARVTFFTDNSY

SEQ ID NO: 238 - protein, 1298 aa, Artificial Sequence
  VEGFR-3 biomarker (UniProt: P35916-2)
MQRGAALCLRLWLCLGLLDGLVSGYSMTPPTLNITEESHVIDTGDSLSISCRGQHPLEWAWPGAQEAPATGDKDSEDTGVVRDCEGTDARPYCKVLLLHEVHANDTGSYVCYYKYIKARIEGTTAASSYVFVRDFEQPFINKPDTLLVNRKDAMWVPCLVSIPGLNVTLRSQSSVLWPDGQEVVWDDRRGMLVSTPLLHDALYLQCETTWGDQDFLSNPFLVHITGNELYDIQLLPRKSLELLVGEKLVLNCTVWAEFNSGVTFDWDYPGKQAERGKWVPERRSQQTHTELSSILTIHNVSQHDLGSYVCKANNGIQRFRESTEVIVHENPFISVEWLKGPILEATAGDELVKLPVKLAAYPPPEFQWYKDGKALSGRHSPHALVLKEVTEASTGTYTLALWNSAAGLRRNISLELVVNVPPQIHEKEASSPSIYSRHSRQALTCTAYGVPLPLSIQWHWRPWTPCKMFAQRSLRRRQQQDLMPQCRDWRAVTTQDAVNPIESLDTWTEFVEGKNKTVSKLVIQNANVSAMYKCVVSNKVGQDERLIYFYVTTIPDGFTIESKPSEELLEGQPVLLSCQADSYKYEHLRWYRLNLSTLHDAHGNPLLLDCKNVHLFATPLAASLEEVAPGARHATLSLSIPRVAPEHEGHYVCEVQDRRSHDKHCHKKYLSVQALEAPRLTQNLTDLLVNVSDSLEMQCLVAGAHAPSIVWYKDERLLEEKSGVDLADSNQKLSIQRVREEDAGRYLCSVCNAKGCVNSSASVAVEGSEDKGSMEIVILVGTGVIAVFFWVLLLLIFCNMRRPAHADIKTGYLSIIMDPGEVPLEEQCEYLSYDASQWEFPRERLHLGRVLGYGAFGKVVEASAFGIHKGSSCDTVAVKMLKEGATASEHRALMSELKILIHIGNHLNVVNLLGACTKPQGPLMVIVEFCKYGNLSNFLRAKRDAFSPCAEKSPEQRGRFRAMVELARLDRRRPGSSDRVLFARFSKTEGGARRASPDQEAEDLWLSPLTMEDLVCYSFQVARGMEFLASRKCIHRDLAARNILLSESDVVKICDFGLARDIYKDPDYVRKGSARLPLKWMAPESIFDKVYTTQSDVWSFGVLLWEIFSLGASPYPGVQINEEFCQRLRDGTRMRAPELATPAIRRIMLNCWSGDPKARPAFSELVEILGDLLQGRGLQEEEEVCMAPRSSQSSEEGSFSQVSTMALHIAQADAEDSPPSLQRHSLAARYYNWVSFPGCLARGAETRGSSRMKTFEEFPMTPTTYKGSVDNQTDSGMVLASEEFEQIESRHRQESGFR

SEQ ID NO: 239 - protein, 830 aa, Artificial Sequence
  VEGFR-3 biomarker (UniProt: P35916-3)
MQRGAALCLRLWLCLGLLDGLVSGYSMTPPTLNITEESHVIDTGDSLSISCRGQHPLEWAWPGAQEAPATGDKDSEDTGVVRDCEGTDARPYCKVLLLHEVHANDTGSYVCYYKYIKARIEGTTAASSYVFVRDFEQPFINKPDTLLVNRKDAMWVPCLVSIPGLNVTLRSQSSVLWPDGQEVVWDDRRGMLVSTPLLHDALYLQCETTWGDQDFLSNPFLVHITGNELYDIQLLPRKSLELLVGEKLVLNCTVWAEFNSGVTFDWDYPGKQAERGKWVPERRSQQTHTELSSILTIHNVSQHDLGSYVCKANNGIQRFRESTEVIVHENPFISVEWLKGPILEATAGDELVKLPVKLAAYPPPEFQWYKDGKALSGRHSPHALVLKEVTEASTGTYTLALWNSAAGLRRNISLELVVNVPPQIHEKEASSPSIYSRHSRQALTCTAYGVPLPLSIQWHWRPWTPCKMFAQRSLRRRQQQDLMPQCRDWRAVTTQDAVNPIESLDTWTEFVEGKNKTVSKLVIQNANVSAMYKCVVSNKVGQDERLIYFYVTTIPDGFTIESKPSEELLEGQPVLLSCQADSYKYEHLRWYRLNLSTLHDAHGNPLLLDCKNVHLFATPLAASLEEVAPGARHATLSLSIPRVAPEHEGHYVCEVQDRRSHDKHCHKKYLSVQALEAPRLTQNLTDLLVNVSDSLEMQCLVAGAHAPSIVWYKDERLLEEKSGREGGPGEGQVRRPARPTIPNPGGPAPPPHPLQESTWRTPTRSCKGPGQNVAVTRAHPDSQGRRRRPERGARGGQVFYNSEYGELSEPSEEDHCSPSARVTFFTDNSY

SEQ ID NO: 240 - protein, 79 aa, Artificial Sequence
  TATI biomarker (UniProt: P00995-1) (entry version 193)
MKVTGIFLLSALALLSLSGNTGADSLGREAKCYNELNGCTKIYDPVCGTDGNTYPNECVLCFENRKRQTSILIQKSGPC

SEQ ID NO: 241 - protein, 267 aa, Artificial Sequence
  MMP-7 biomarker (UniProt: P09237-1) (entry version 197)
MRLTVLCAVCLLPGSLALPLPQEAGGMSELQWEQAQDYLKRFYLYDSETKNANSLEAKLKEMQKFFGLPITGMLNSRVIEIMQKPRCGVPDVAEYSLFPNSPKWTSKVVTYRIVSYTRDLPHITVDRLVSKALNMWGKEIPLHFRKVVWGTADIMIGFARGAHGDSYPFDGPGNTLAHAFAPGTGLGGDAHFDEDERWTDGSSLGINFLYAATHELGHSLGMGHSSDPNAVMYPTYGNGDPQNFKLSQDDIKGIQKLYGKRSNSRKK

SEQ ID NO: 242 - protein, 267 aa, Artificial Sequence
  Apo A-I (UniProt: P02647-1) (entry version 241)
MKAAVLTLAVLFLTGSQARHFWQQDEPPQSPWDRVKDLATVYVDVLKDSGRDYVSQFEGSALGKQLNLKLLDNWDSVTSTFSKLREQLGPVTQEFWDNLEKETEGLRQEMSKDLEEVKAKVQPYLDDFQKKWQEEMELYRQKVEPLRAELQEGARQKLHELQEKLSPLGEEMRDRARAHVDALRTHLAPYSDELRQRLAARLEALKENGGARLAEYHAKATEHLSTLSEKAKPALEDLRQGLLPVLESFKVSFLSALEEYTKKLNTQ

SEQ ID NO: 243 - protein, 496 aa, Artificial Sequence
  ANG-2 biomarker (UniProt: O15123-1) (entry version 163)
MWQIVFFTLSCDLVLAAAYNNFRKSMDSIGKKQYQVQHGSCSYTFLLPEMDNCRSSSSPYVSNAVQRDAPLEYDDSVQRLQVLENIMENNTQWLMKLENYIQDNMKKEMVEIQQNAVQNQTAVMIEIGTNLLNQTAEQTRKLTDVEAQVLNQTTRLELQLLEHSLSTNKLEKQILDQTSEINKLQDKNSFLEKKVLAMEDKHIIQLQSIKEEKDQLQVLVSKQNSIIEELEKKIVTATVNNSVLQKQQHDLMETVNNLLTMMSTSNSAKDPTVAKEEQISFRDCAEVFKSGHTTNGIYTLTFPNSTEEIKAYCDMEAGGGGWTIIQRREDGSVDFQRTWKEYKVGFGNPSGEYWLGNEFVSQLTNQQRYVLKIHLKDWEGNEAYSLYEHFYLSSEELNYRIHLKGLTGTAGKISSISQPGNDFSTKDGDNDKCICKCSQMLTGGWWFDACGPSNLNGMYYPQRQNTNKFNGIKWYYWKGSGYSLKATTMMIRPADF

SEQ ID NO: 244 - protein, 444 aa, Artificial Sequence
  ANG-2 biomarker (UniProt: O15123-2)
MWQIVFFTLSCDLVLAAAYNNFRKSMDSIGKKQYQVQHGSCSYTFLLPEMDNCRSSSSPYVSNAVQRDAPLEYDDSVQRLQVLENIMENNTQWLMKVLNQTTRLELQLLEHSLSTNKLEKQILDQTSEINKLQDKNSFLEKKVLAMEDKHIIQLQSIKEEKDQLQVLVSKQNSIIEELEKKIVTATVNNSVLQKQQHDLMETVNNLLTMMSTSNSAKDPTVAKEEQISFRDCAEVFKSGHTTNGIYTLTFPNSTEEIKAYCDMEAGGGGWTIIQRREDGSVDFQRTWKEYKVGFGNPSGEYWLGNEFVSQLTNQQRYVLKIHLKDWEGNEAYSLYEHFYLSSEELNYRIHLKGLTGTAGKISSISQPGNDFSTKDGDNDKCICKCSQMLTGGWWFDACGPSNLNGMYYPQRQNTNKFNGIKWYYWKGSGYSLKATTMMIRPADF

SEQ ID NO: 245 - protein, 495 aa, Artificial Sequence
  ANG-2 biomarker (UniProt: O15123-3)
MWQIVFFTLSCDLVLAAAYNNFRKSMDSIGKKQYQVQHGSCSYTFLLPEMDNCRSSSSPYVSNAVQRDAPLEYDDSVQRLQVLENIMENNTQWLMKLENYIQDNMKKEMVEIQQNAVQNQTAVMIEIGTNLLNQTAEQTRKLTDVEAQVLNQTTRLELQLLEHSLSTNKLEKQILDQTSEINKLQDKNSFLEKKVLAMEDKHIIQLQSIKEEKDQLQVLVSKQNSIIEELEKKIVTATVNNSVLQKQQHDLMETVNNLLTMMSTSNSKDPTVAKEEQISFRDCAEVFKSGHTTNGIYTLTFPNSTEEIKAYCDMEAGGGGWTIIQRREDGSVDFQRTWKEYKVGFGNPSGEYWLGNEFVSQLTNQQRYVLKIHLKDWEGNEAYSLYEHFYLSSEELNYRIHLKGLTGTAGKISSISQPGNDFSTKDGDNDKCICKCSQMLTGGWWFDACGPSNLNGMYYPQRQNTNKFNGIKWYYWKGSGYSLKATTMMIRPADF

SEQ ID NO: 246 - protein, 146 aa, Artificial Sequence
  Cystatin-C biomarker (UniProt: P05981-1) (entry version 183)
MAGPLRAPLLLLAILAVALAVSPAAGSSPGKPPRLVGGPMDASVEEEGVRRALDFAVGEYNKASNDMYHSRALQVVRARKQIVAGVNYFLDVELGRTTCTKTQPNLDNCPFHDQPHLKRKAFCSFQIYAVPWQGTMTLSKSTCQDA

SEQ ID NO: 247 - protein, 417 aa, Artificial Sequence
  Hepsin biomarker (UniProt: P05981-1) (entry version 183)
MAQKEGGRTVPCCSRPKVAALTAGTLLLLTAIGAASWAIVAVLLRSDQEPLYPVQVSSADARLMVFDKTEGTWRLLCSSRSNARVAGLSCEEMGFLRALTHSELDVRTAGANGTSGFFCVDEGRLPHTQRLLEVISVCDCPRGRFLAAICQDCGRRKLPVDRIVGGRDTSLGRWPWQVSLRYDGAHLCGGSLLSGDWVLTAAHCFPERNRVLSRWRVFAGAVAQASPHGLQLGVQAVVYHGGYLPFRDPNSEENSNDIALVHLSSPLPLTEYIQPVCLPAAGQALVDGKICTVTGWGNTQYYGQQAGVLQEARVPIISNDVCNGADFYGNQIKPKMFCAGYPEGGIDACQGDSGGPFVCEDSISRTPRWRLCGIVSWGTGCALAQKPGVYTKVSDFREWIFQAIKTHSEASGMVTQL

SEQ ID NO: 248 - protein, 569 aa, Artificial Sequence
  IL-1RI biomarker (UniProt: P14778-1) (entry version 215)
MKVLLRLICFIALLISSLEADKCKEREEKIILVSSANEIDVRPCPLNPNEHKGTITWYKDDSKTPVSTEQASRIHQHKEKLWFVPAKVEDSGHYYCVVRNSSYCLRIKISAKFVENEPNLCYNAQAIFKQKLPVAGDGGLVCPYMEFFKNENNELPKLQWYKDCKPLLLDNIHFSGVKDRLIVMNVAEKHRGNYTCHASYTYLGKQYPITRVIEFITLEENKPTRPVIVSPANETMEVDLGSQIQLICNVTGQLSDIAYWKWNGSVIDEDDPVLGEDYYSVENPANKRRSTLITVLNISEIESRFYKHPFTCFAKNTHGIDAAYIQLIYPVTNFQKHMIGICVTLTVIIVCSVFIYKIFKIDIVLWYRDSCYDFLPIKASDGKTYDAYILYPKTVGEGSTSDCDIFVFKVLPEVLEKQCGYKLFIYGRDDYVGEDIVEVINENVKKSRRLIIILVRETSGFSWLGGSSEEQIAMYNALVQDGIKVVLLELEKIQDYEKMPESIKFIKQKHGAIRWSGDFTQGPQSAKTRFWKNVRYHMPVQRRSPSSKHQLLSPATKEKLQREAHVPLG

SEQ ID NO: 249 - protein, 119 aa, Artificial Sequence
  Eotaxin-2 biomarker (UniProt: O00175) (entry version 162)
MAGLMTIVTSLLFLGVCAHHIIPTGSVVIPSPCCMFFVSKRIPENRVVSYQLSSRSTCLKAGVIFTTKKGQQFCGDPKQEWVQRYMKNLDAKQKKASPRARAVAVKGPVQRYPGNQTTC

SEQ ID NO: 250 - protein, 745 aa, Artificial Sequence
  MPO biomarker (UniProt: P05164-1) (entry version 217)
MGVPFFSSLRCMVDLGPCWAGGLTAEMKLLLALAGLLAILATPQPSEGAAPAVLGEVDTSLVLSSMEEAKQLVDKAYKERRESIKQRLRSGSASPMELLSYFKQPVAATRTAVRAADYLHVALDLLERKLRSLWRRPFNVTDVLTPAQLNVLSKSSGCAYQDVGVTCPEQDKYRTITGMCNNRRSPTLGASNRAFVRWLPAEYEDGFSLPYGWTPGVKRNGFPVALARAVSNEIVRFPTDQLTPDQERSLMFMQWGQLLDHDLDFTPEPAARASFVTGVNCETSCVQQPPCFPLKIPPNDPRIKNQADCIPFFRSCPACPGSNITIRNQINALTSFVDASMVYGSEEPLARNLRNMSNQLGLLAVNQRFQDNGRALLPFDNLHDDPCLLTNRSARIPCFLAGDTRSSEMPELTSMHTLLLREHNRLATELKSLNPRWDGERLYQEARKIVGAMVQIITYRDYLPLVLGPTAMRKYLPTYRSYNDSVDPRIANVFTNAFRYGHTLIQPFMFRLDNRYQPMEPNPRVPLSRVFFASWRVVLEGGIDPILRGLMATPAKLNRQNQIAVDEIRERLFEQVMRIGLDLPALNMQRSRDHGLPGYNAWRRFCGLPQPETVGQLGTVLRNLKLARKLMEQYGTPNNIDIWMGGVSEPLKRKGRVGPLLACIIGTQFRKLRDGDRFWWENEGVFSMQQRQALAQISLPRIICDNTGITTVSKNNIFMSNSYPRDFVNCSTLPALNLASWREAS

SEQ ID NO: 251 - protein, 650 aa, Artificial Sequence
  MPO biomarker (UniProt: P05164-2)
MELLSYFKQPVAATRTAVRAADYLHVALDLLERKLRSLWRRPFNVTDVLTPAQLNVLSKSSGCAYQDVGVTCPEQDKYRTITGMCNNRRSPTLGASNRAFVRWLPAEYEDGFSLPYGWTPGVKRNGFPVALARAVSNEIVRFPTDQLTPDQERSLMFMQWGQLLDHDLDFTPEPAARASFVTGVNCETSCVQQPPCFPLKIPPNDPRIKNQADCIPFFRSCPACPGSNITIRNQINALTSFVDASMVYGSEEPLARNLRNMSNQLGLLAVNQRFQDNGRALLPFDNLHDDPCLLTNRSARIPCFLAGDTRSSEMPELTSMHTLLLREHNRLATELKSLNPRWDGERLYQEARKIVGAMVQIITYRDYLPLVLGPTAMRKYLPTYRSYNDSVDPRIANVFTNAFRYGHTLIQPFMFRLDNRYQPMEPNPRVPLSRVFFASWRVVLEGGIDPILRGLMATPAKLNRQNQIAVDEIRERLFEQVMRIGLDLPALNMQRSRDHGLPGYNAWRRFCGLPQPETVGQLGTVLRNLKLARKLMEQYGTPNNIDIWMGGVSEPLKRKGRVGPLLACIIGTQFRKLRDGDRFWWENEGVFSMQQRQALAQISLPRIICDNTGITTVSKNNIFMSNSYPRDFVNCSTLPALNLASWREAS

SEQ ID NO: 252 - protein, 777 aa, Artificial Sequence
  MPO biomarker (UniProt: P05164-3)
MGVPFFSSLRCMVDLGPCWAGGLTAEMKLLLALAGLLAILATPQPSEGAAPAVLGEVDTSLVLSSMEEAKQLVDKAYKERRESIKQRLRSGSASPMELLSYFKQPVAATRTAVRAADYLHVALDLLERKLRSLWRRPFNVTDVLTPAQLNVLSKSSGCAYQDVGVTCPEQDKYRTITGMCNNRCGWLGVAAGTGLREASRTPQASRCQRPVLPCRRSPTLGASNRAFVRWLPAEYEDGFSLPYGWTPGVKRNGFPVALARAVSNEIVRFPTDQLTPDQERSLMFMQWGQLLDHDLDFTPEPAARASFVTGVNCETSCVQQPPCFPLKIPPNDPRIKNQADCIPFFRSCPACPGSNITIRNQINALTSFVDASMVYGSEEPLARNLRNMSNQLGLLAVNQRFQDNGRALLPFDNLHDDPCLLTNRSARIPCFLAGDTRSSEMPELTSMHTLLLREHNRLATELKSLNPRWDGERLYQEARKIVGAMVQIITYRDYLPLVLGPTAMRKYLPTYRSYNDSVDPRIANVFTNAFRYGHTLIQPFMFRLDNRYQPMEPNPRVPLSRVFFASWRVVLEGGIDPILRGLMATPAKLNRQNQIAVDEIRERLFEQVMRIGLDLPALNMQRSRDHGLPGYNAWRRFCGLPQPETVGQLGTVLRNLKLARKLMEQYGTPNNIDIWMGGVSEPLKRKGRVGPLLACIIGTQFRKLRDGDRFWWENEGVFSMQQRQALAQISLPRIICDNTGITTVSKNNIFMSNSYPRDFVNCSTLPALNLASWREAS

SEQ ID NO: 253 - protein, 134 aa, Artificial Sequence
  NT proBNP biomarker (UniProt: P16860-1) (entry version 186)
MDPQTAPSRALLLLLFLHLAFLGGRSHPLGSPGSASDLETSGLQEQRNHLQGKLSELQVEQTSLEPLQESPRPTGVWKSREVATEGIRGHRKMVLYTLRAPRSPKMVQGSGCFGRKMDRISSSSGLGCKVLRRH

SEQ ID NO: 254 - protein, 1388 aa, Artificial Sequence
  Endostatin biomarker (UniProt: P39059-1) (entry version 170)
MAPRRNNGQCWCLLMLLSVSTPLPAVTQTRGATETASQGHLDLTQLIGVPLPSSVSFVTGYGGFPAYSFGPGANVGRPARTLIPSTFFRDFAISVVVKPSSTRGGVLFAITDAFQKVIYLGLRLSGVEDGHQRIILYYTEPGSHVSQEAAAFSVPVMTHRWNRFAMIVQGEEVTLLVNCEEHSRIPFQRSSQALAFESSAGIFMGNAGATGLERFTGSLQQLTVHPDPRTPEELCDPEESSASGETSGLQEADGVAEILEAVTYTQASPKEAKVEPINTPPTPSSPFEDMELSGEPVPEGTLETTNMSIIQHSSPKQGSGEILNDTLEGVHSVDGDPITDSGSGAGAFLDIAEEKNLAATAAGLAEVPISTAGEAEASSVPTGGPTLSMSTENPEEGVTPGPDNEERLAATAAGEAEALASMPGEVEASGVAPGELDLSMSAQSLGEEATVGPSSEDSLTTAAAATEVSLSTFEDEEASGVPTDGLAPLTATMAPERAVTSGPGDEEDLAAATTEEPLITAGGEESGSPPPDGPPLPLPTVAPERWITPAQREHVGMKGQAGPKGEKGDAGEELPGPPEPSGPVGPTAGAEAEGSGLGWGSDVGSGSGDLVGSEQLLRGPPGPPGPPGLPGIPGKPGTDVFMGPPGSPGEDGPAGEPGPPGPEGQPGVDGATGLPGMKGEKGARGPNGSVGEKGDPGNRGLPGPPGKKGQAGPPGVMGPPGPPGPPGPPGPGCTMGLGFEDTEGSGSTQLLNEPKLSRPTAAIGLKGEKGDRGPKGERGMDGASIVGPPGPRGPPGHIKVLSNSLINITHGFMNFSDIPELVGPPGPDGLPGLPGFPGPRGPKGDTGLPGFPGLKGEQGEKGEPGAILTEDIPLERLMGKKGEPGMHGAPGPMGPKGPPGHKGEFGLPGRPGRPGLNGLKGTKGDPGVIMQGPPGLPGPPGPPGPPGAVINIKGAIFPIPVRPHCKMPVDTAHPGSPELITFHGVKGEKGSWGLPGSKGEKGDQGAQGPPGPPLDLAYLRHFLNNLKGENGDKGFKGEKGEKGDINGSFLMSGPPGLPGNPGPAGQKGETVVGPQGPPGAPGLPGPPGFGRPGDPGPPGPPGPPGPPAILGAAVALPGPPGPPGQPGLPGSRNLVTAFSNMDDMLQKAHLVIEGTFIYLRDSTEFFIRVRDGWKKLQLGELIPIPADSPPPPALSSNPHQLLPPPNPISSANYEKPALHLAALNMPFSGDIRADFQCFKQARAAGLLSTYRAFLSSHLQDLSTIVRKAERYSLPIVNLKGQVLFNNWDSIFSGHGGQFNMHIPIYSFDGRDIMTDPSWPQKVIWHGSSPHGVRLVDNYCEAWRTADTAVTGLASPLSTGKILDQKAYSCANRLIVLCIENSFMTDARK

SEQ ID NO: 255 - protein, 325 aa, Artificial Sequence
  IGFBP-2 biomarker (UniProt: P18065-1) (entry version 193)
MLPRVGCPALPLPPPPLLPLLLLLLGASGGGGGARAEVLFRCPPCTPERLAACGPPPVAPPAAVAAVAGGARMPCAELVREPGCGCCSVCARLEGEACGVYTPRCGQGLRCYPHPGSELPLQALVMGEGTCEKRRDAEYGASPEQVADNGDDHSEGGLVENHVDSTMNMLGGGGSAGRKPLKSGMKELAVFREKVTEQHRQMGKGGKHHLGLEEPKKLRPPPARTPCQQELDQVLERISTMRLPDERGPLEHLYSLHIPNCDKHGLYNLKQCKMSLNGQRGECWCVNPNTGKLIQGAPTIRGDPECHLFYNEQQEARGVHTQRMQ

SEQ ID NO: 256 - protein, 354 aa, Artificial Sequence
  VEGF-D biomarker (UniProt: O43915-1) (entry version 159)
MYREWVVVNVFMMLYVQLVQGSSNEHGPVKRSSQSTLERSEQQIRAASSLEELLRITHSEDWKLWRCRLRLKSFTSMDSRSASHRSTRFAATFYDIETLKVIDEEWQRTQCSPRETCVEVASELGKSTNTFFKPPCVNVFRCGGCCNEESLICMNTSTSYISKQLFEISVPLTSVPELVPVKVANHTGCKCLPTAPRHPYSIIRRSIQIPEEDRCSHSKKLCPIDMLWDSNKCKCVLQEENPLAGTEDHSHLQEPALCGPHMMFDEDRCECVCKTPCPKDLIQHPKNCSCFECKESLETCCQKHKLFHPDTCSCEDRCPFHTRPCASGKTACAKHCRFPKEKRAAQGPHSRKNP

SEQ ID NO: 257 - protein, 99 aa, Artificial Sequence
  MCP-3 biomarker (UniProt: P80098-1) (entry version 169)
MKASAALLCLLLTAAAFSPQGLAQPVGINTSTTCCYRFINKKIPKQRLESYRRTTSSHCPREAVIFKTKLDKEICADPTQKWVQDFMKHLDKKTQTPKL

SEQ ID NO: 258 - protein, 154 aa, Artificial Sequence [sequence omitted]

SEQ ID NO: 259 - protein, 429 aa, Artificial Sequence
  BMP-9 biomarker (UniProt: Q9UK05-1) (entry version 162)
MCPGALWVALPLLSLLAGSLQGKPLQSWGRGSAGGNAHSPLGVPGGGLPEHTFNLKMFLENVKVDFLRSLNLSGVPSQDKTRVEPPQYMIDLYNRYTSDKSTTPASNIVRSFSMEDAISITATEDFPFQKHILLFNISIPRHEQITRAELRLYVSCQNHVDPSHDLKGSVVIYDVLDGTDAWDSATETKTFLVSQDIQDEGWETLEVSSAVKRWVRSDSTKSKNKLEVTVESHRKGCDTLDISVPPGSRNLPFFVVFSNDHSSGTKETRLELREMISHEQESVLKKLSKDGSTEAGESSHEEDTDGHVAAGSTLARRKRSAGAGSHCQKTSLRVNFEDIGWDSWIIAPKEYEAYECKGGCFFPLADDVTPTKHAIVQTLVHLKFPTKVGKACCVPTKLSPISVLYKDDMGVPTLKYHYEGMSVAECGCR

SEQ ID NO: 260 - protein, 124 aa, Artificial Sequence
  HE4 biomarker (UniProt: Q14508-1) (entry version 169)
MPACRLGPLAAALLLSLLLFGFTLVSGTGAEKTGVCPELQADQNCTQECVSDSECADNLKCCSAGCATFCSLPNDKEGSCPQVNINFPQLGLCRDQCQVDSQCPGQMKCCRNGCGKVSCVTPNF

SEQ ID NO: 261 - protein, 73 aa, Artificial Sequence
  HE4 biomarker (UniProt: Q14508-2)
MLQVQVNLPVSPLPTYPYSFFYPDKEGSCPQVNINFPQLGLCRDQCQVDSQCPGQMKCCRNGCGKVSCVTPNF

SEQ ID NO: 262 - protein, 76 aa, Artificial Sequence
  HE4 biomarker (UniProt: Q14508-3)
MPACRLGPLAAALLLSLLLFGFTLVSDKEGSCPQVNINFPQLGLCRDQCQVDSQCPGQMKCCRNGCGKVSCVTPNF

SEQ ID NO: 263 - protein, 80 aa, Artificial Sequence
  HE4 biomarker (UniProt: Q14508-4)
MPACRLGPLAAALLLSLLLFGFTLVSGTGAEKTGVCPELQADQNCTQECVSDSECADNLKCCSAGCATFCLLCPNGQLAE

SEQ ID NO: 264 - protein, 102 aa, Artificial Sequence
  HE4 biomarker (UniProt: Q14508-5)
MPACRLGPLAAALLLSLLLFGFTLVSGTGAEKTGVCPELQADQNCTQECVSDSECADNLKCCSAGCATFCSLPNALFHWHLKTRRLWEISGPRPRRPTWDSS

SEQ ID NO: 265 - protein, 185 aa, Artificial Sequence
  ADM biomarker (UniProt: P35318-1) (entry version 174)
MKLVSVALMYLGSLAFLGADTARLDVASEFRKKWNKWALSRGKRELRMSSSYPTGLADVKAGPAQTLIRPQDMKGASRSPEDSSPDAARIRVKRYRQSMNNFQGLRSFGCRFGTCTVQKLAHQIYQFTDKDKDNVAPRSKISPQGYGRRRRRSLPEAGPGRTLVSSKPQAHGAPAPPSGSAPHFL

SEQ ID NO: 266 - protein, 119 aa, Artificial Sequence
  B2M biomarker (UniProt: P61769-1) (entry version 181)
MSRSVALAVLALLSLSGLEAIQRTPKIQVYSRHPAENGKSNFLNCYVSGFHPSDIEVDLLKNGERIEKVEHSDLSFSKDWSFYLLYYTEFTPTEKDEYACRVNHVTLSQPKIVKWDRDM

SEQ ID NO: 267 - protein, 172 aa, Artificial Sequence
  FOLR3 biomarker (UniProt: P41439-4)
MDMAWQMMQLLLLALVTAAGSAQPRSARARTDLLNVCMNAKHHKTQPSPEDELYGQVGAPQGPSPGSVPLDDLPGAEEPEYGGDGCGGERLSPVSSPPSAVPGRRMPAARPAPARSCTRTPPACTTLTGITVVRWNPPASATLSRTAVSMSAHPTWGPGSGRSTRAGAKSAF

1. A method of predicting a cancer-related outcome in a subject, the method comprising assessing the activity, expression, or amount of one or more biomarker in the subject, or in a sample derived from the subject;
wherein the one or more biomarker is selected from the group consisting of: Axl, FGF-21, RAGE, CEA, FSH, MMP-10, Omentin, CA-19-9, LH, Haptoglobin, NAP-2, IgE, and/or CD40-L; and
wherein the subject has, is suspected of having, or has been diagnosed with acute myelocytic leukemia (AML).

2. A method according to claim 1, wherein the method comprises:
assessing the activity, expression, or amount of one or more biomarker in the subject, or in a sample derived from the subject, to obtain a sample profile of the one or more biomarker; and
making a prediction based on the sample profile of the one or more biomarker;
optionally wherein the prediction is made by comparing the sample profile to a control profile.

3. A method according to claim 2, wherein the sample profile is obtained before the subject is contacted with or administered an agent capable of inhibiting or reversing EMT or a chemotherapeutic agent.

4. A method according to claim 3, wherein the control profile is:
(i) obtained from a population of control subjects having AML; or
(ii) obtained from a control subject or population of control subjects having AML and previously found to lack susceptibility to treatment with an agent capable of inhibiting or reversing EMT or a chemotherapeutic agent;
(iii) a predetermined profile of “average, median, or mean” or “standard ranges” of biomarker expression, activity, or amount values obtained from a control subject or population of control subjects having AML and previously found to lack susceptibility to treatment with an agent capable of inhibiting or reversing EMT or a chemotherapeutic agent;
(iv) obtained from a control sample having a known “average, median, or mean” value of biomarkers indicative of a control subject or population of control subjects having AML and previously found to lack susceptibility to treatment with an agent capable of inhibiting or reversing EMT or a chemotherapeutic agent;
(v) a predetermined profile of biomarker expression, activity, or amount “threshold” values obtained from a control subject or population of control subjects having AML and previously found to be susceptible to treatment with an agent capable of inhibiting or reversing EMT or a chemotherapeutic agent; or
(vi) obtained from a control sample having a known “threshold” value of biomarkers indicative of a control subject or population of control subjects having AML and previously found to be susceptible to treatment with an agent capable of inhibiting or reversing EMT or a chemotherapeutic agent.

5. A method according to any one of claims 3-4, wherein the one or more biomarker includes at least one of: Haptoglobin, NAP-2, IgE, and/or CD40-L,
and wherein a higher activity, expression, or amount of one or more of said biomarkers in the sample profile as compared with the control profile is indicative of susceptibility to treatment with an agent capable of inhibiting or reversing EMT or a chemotherapeutic agent.

6. A method according to any one of claims 3-5, wherein the one or more biomarker includes at least one of: Axl, FGF-21, RAGE, CEA, FSH, MMP-10, Omentin, CA-19-9, and/or LH,
and wherein a lower activity, expression, or amount of one or more of said biomarkers in the sample profile as compared with the control profile is indicative of susceptibility to treatment with an agent capable of inhibiting or reversing EMT or a chemotherapeutic agent.

7. A method according to any one of claims 1-6, wherein the one or more biomarker comprises Axl,
optionally wherein the one or more biomarker comprises Axl and at least 1, 2, 3, 4, 5, 6, 7, 8, 9, 10, or more further biomarkers selected from: FGF-21, RAGE, CEA, FSH, MMP-10, Omentin, CA-19-9, LH, Haptoglobin, NAP-2, IgE, and/or CD40-L.

8. A method according to claim 2, wherein the sample profile is obtained after contacting the subject with an agent capable of inhibiting or reversing EMT or a chemotherapeutic agent,
optionally wherein the control profile is obtained from the same subject prior to contacting said subject with the agent capable of inhibiting or reversing EMT or a chemotherapeutic agent.

9. A method according to claim 8, wherein an increase in the activity, expression, or amount of one or more biomarker in the sample profile as compared with the control profile is indicative of higher susceptibility to treatment with an agent capable of inhibiting or reversing EMT or a chemotherapeutic agent.

10. A method according to claim 9, wherein the one or more biomarker includes at least Axl.

11. A method according to any one of claims 1-10, wherein the method comprises determining the amount of at least 2, 3, 4, 5, 6, 7, 8, 9, 10, 11, 12, 13, 14, 15, 20 of said biomarkers in the subject, or sample derived from the subject.

12. A method according to any one of claims 1-11, wherein assessing the expression or amount of one or more biomarker in the subject, or in a sample derived from the subject, comprises:
contacting a sample, or an extract from the sample, with at least 1, 2, 3, 4, 5, 6, 7, 8, 9, 10 or more specific binding members, each of which selectively binds to a respective biomarker protein; and
detecting and/or quantifying formation of complex formed by said specific binding member and said biomarker protein,
optionally wherein the specific binding member comprises an antibody molecule or binding fragment thereof.

13. A method according to any one of claims 3-12, wherein the agent capable of inhibiting or reversing EMT or chemotherapeutic agent is an Axl inhibitor.

14. A method according to claim 13, wherein the Axl inhibitor is BGB324/R428/bemcentinib.

15. A method according to claim 13, wherein the Axl inhibitor is an anti-Axl antibody described in WO2015/193428, WO2015/193430, WO2016/097370, or WO2016/166296

16. A method according to any one of claims 3-15, wherein the agent capable of inhibiting or reversing EMT is administered in combination with a further cancer treatment.

17. A method according to claim 16, wherein the further cancer treatment is cytarabine or decitabine.

18. A method according to any one of claims 1-17, wherein the subject is mammalian;
optionally wherein the subject is human.

19. A method according to any one of claims 1-18, wherein the sample is a blood, serum, or plasma sample;
optionally wherein the sample is a serum sample.

20. A method according to any one of any one of claims 1-19, wherein the method is performed in vitro or ex vivo.

21. A method of selecting subjects having, suspected of having, or diagnosed with acute myelocytic leukemia (AML) for treatment with an agent capable of inhibiting or reversing EMT or a chemotherapeutic agent, the method comprising:
identifying subjects susceptible to treatment with an agent capable of inhibiting or reversing EMT or a chemotherapeutic agent using a method according to any one of claims 1-20; and
selecting thus identified subjects for treatment.

22. A method of selecting subjects having, suspected of having, or diagnosed with acute myelocytic leukemia (AML) for continued treatment with an agent capable of inhibiting or reversing EMT or a chemotherapeutic agent, the method comprising:
identifying subjects susceptible to treatment with an agent capable of inhibiting or reversing EMT or a chemotherapeutic agent using a method according to any one of claims 8-20; and
selecting thus identified subjects for continued treatment.

23. A diagnostic kit or test device comprising:
1, 2, 3, 4, 5, 6, 7, 8, 9, 10 or more specific binding members, each of which selectively binds to a biomarker selected from the group consisting of: Axl, FGF-21, RAGE, CEA, FSH, MMP-10, Omentin, CA-19-9, LH, Haptoglobin, NAP-2, IgE, and/or CD40-L; and
one or more reagents for detecting said one or more specific binding members or one or more reagents for detecting and/or quantifying formation of a complex formed by said specific binding member and said biomarker.

24. A diagnostic kit or test device according to claim 23 for use in a method of predicting a cancer-related outcome in a subject,
optionally wherein the method is a method according to any one of claims 1-20.

25. Use of one or more of: Axl, FGF-21, RAGE, CEA, FSH, MMP-10, Omentin, CA-19-9, LH, Haptoglobin, NAP-2, IgE, and/or CD40-L, as a biomarker for determining if a subject is susceptible to treatment with an agent capable of inhibiting or reversing EMT or a chemotherapeutic agent,
optionally wherein the use is as a biomarker in a method according to any one of claims 1-20.
